(19) United States
(12) Patent Application Publication
(10) Pub. No.: US 2021/0155671 A1
(43) Pub. Date: May 27, 2021

(54) USES OF CD20-BINDING MOLECULES AND ADDITIONAL THERAPEUTIC AGENTS

(71) Applicant: Molecular Templates, Inc., Austin, TX (US)

(72) Inventors: Eric Poma, New York, NY (US); Roger Waltzman, New York, NY (US); Thomas Strack, New Rochelle, NY (US)

(21) Appl. No.: 17/103,304

(22) Filed: Nov. 24, 2020

Related U.S. Application Data
(60) Provisional application No. 63/061,062, filed on Aug. 4, 2020.
(60) Provisional application No. 62/939,673, filed on Nov. 24, 2019.

(51) Int. Cl. C07K 14/705; A61K 31/454; A61K 47/26

(52) U.S. Cl. CPC C07K 14/70596; A61K 9/0053; A61K 47/26; A61K 31/454

(57) ABSTRACT

Provided herein are uses of CD20-binding molecules and one or more additional therapeutic agents. Certain CD20-binding molecules useful in the methods disclosed herein comprise 1) two or more CD20 binding regions and 2) one or more Shiga toxin effector polypeptides derived from an A Subunit of a member of the Shiga toxin family. Also disclosed herein are uses of CD20-binding molecules, and compositions thereof, (such as in conjunction with one or more additional therapeutic agents) for selective killing of specific cell types (such as a CD20-expressing tumor cell) and/or treating a variety of conditions, including cancers and tumors involving a CD20-expressing cell.

### CROSS REFERENCE TO RELATED APPLICATIONS

[0001] This application claims priority to U.S. Provisional Application No. 63/061,062, filed on Aug. 4, 2020 and U.S. Provisional Application No. 62/939,673, filed on Nov. 24, 2019, each of which is incorporated by reference herein in its entirety.

### SEQUENCE LISTING

[0002] The Sequence Listing associated with this application is provided in text format in lieu of a paper copy, and is hereby incorporated by reference into the specification. The name of the text file containing the Sequence Listing is MTEM-012-03US-Sequence-Listing.txt. The text file is about 1.19 megabytes in size, was created on Nov. 24, 2020, and is being submitted electronically via EFS-Web.

### TECHNICAL FIELD

[0003] The present application relates to CD20-binding molecules comprising a CD20-binding region and a toxin effector region, such as, e.g., a Shiga toxin effector polypeptide derived from the A1 fragment of the A Subunit of a member(s) of the Shiga toxin family, and compositions comprising the same. This application also relates to compositions and methods for treating a variety of diseases, disorders, and conditions, including compositions and methods for treating cancer and/or tumors.

### BACKGROUND

[0004] The development of synthetic fusion proteins from toxins that are effective as therapeutics has challenged scientists for decades. Naturally occurring toxins or truncated toxin fragments have been linked or fused to immunoglobulin domains or receptor ligands through chemical conjugation or recombinant protein engineering techniques with the hope of creating cell-targeted therapeutic molecules. The aim of such molecular engineering techniques is to design chimeric molecules with the dual functionality of: 1) delivering toxins to specific cell types or places within an organism after systemic administration; and 2) effectuating a targeted cytotoxicity to specific cells using potent cytotoxicity mechanisms, such as toxin catalytic activities.

[0005] CD20 is an attractive target for therapies, such as for lymphocyte proliferation disorders and/or autoimmune diseases. There is a need in the art to develop effective compositions, therapeutic molecules, and therapeutic methods which target cells expressing cell-surface CD20. In particular, there is a need in the art to develop therapies using CD20-targeted molecules that trigger rapid and/or efficient cellular internalization of cell-surface CD20 molecules as anti-neoplastic therapeutics. Such cell-targeted therapies may be used for the targeted killing of CD20-expressing cells, such as, e.g., certain malignant cells, B-lymphocytes (B-cells), and T-lymphocytes (T-cells). New therapies are especially needed for patients who are insensitive or develop resistance to current CD20-targeted therapies relying on extracellular mechanisms, such as, e.g., immune mechanisms based on signaling function(s) of an immunoglobulin domain like a fragment crystallizable Fc region (Fc region) interaction(s) with a Fc receptor(s) or the complement system.

[0006] There accordingly remains a need in the art for therapies using CD20-binding molecules which exhibit efficient and effective cellular internalization, intracellular-routing, and potent cytotoxicity toward CD20-expressing cells for the treatment of a variety of diseases, such as, e.g., cancers and tumors involving CD20-expressing cells.

### BRIEF SUMMARY

[0007] Provided herein are methods for treating or slowing progression of a disease, disorder, or condition, comprising administering to a subject in need thereof an effective amount of (i) a CD20-binding molecule and (ii) at least one additional therapeutic agent, wherein the CD20-binding molecule comprises (a) a CD20-binding region, wherein the CD20-binding region is capable of specifically binding an extracellular portion of a CD20 protein, and (b) a Shiga toxin effector polypeptide.

[0008] In some embodiments, a method for treating or slowing the progression of a disease, disorder, or condition comprises administering to a subject in need thereof an effective amount of (i) a CD20-binding molecule; and (ii) one or more additional therapeutic agents; wherein the CD20-binding molecule comprises a polypeptide having the sequence of SEQ ID NO: 54. The one or more additional therapeutic agents may be, for example, a nucleoside analog (e.g. gemcitabine), a platinum-based chemotherapeutic agent (e.g. oxaliplatin), an immunomodulatory drug (e.g. lenalidomide), a Bruton's tyrosine kinase (BTK) inhibitor, a PI3K inhibitor, or sirolimus (i.e., rapamycin).

[0009] These and other features, aspects and advantages of the invention will become better understood in view of the following description, appended claims, and accompanying figures. The features, aspects and advantages of the invention may be individually combined or removed freely.

### BRIEF DESCRIPTION OF THE FIGURES

[0010] FIGS. 1A, 1B, and 1C show schematic representations of illustrative CD20-binding molecules as described herein. FIG. 1A shows the general architecture of illustrative CD20-binding proteins. FIG. 1B shows schematic representations of illustrative CD20-binding molecules that each comprise two CD20 binding regions where a small, vertical line may represent any suitable type of molecular association, such as, e.g., a single covalent bond like a disulfide bond or a linker, whether flexible or rigid; and a curved line may represent any suitable type of molecular association, such as, e.g., a flexible linker. FIG. 1C shows schematic representations of illustrative CD20-binding molecules, which each comprise two CD20-binding regions derived from an immunoglobulin(s), and with examples of non-covalent, intermolecular associations as a result of intermolecular domain swapping between immunoglobulin-derived, CD20-binding regions. In FIG. 1C, the heavier weight lines represent any suitable type of molecular association, such as, e.g., a covalent bond or linker; and the lighter weight lines represent connections between immunoglobulin-derived domains of a CD20 binding region component, such as, e.g., a single covalent bond or a fifty amino acid residue linker. The schematic representations in FIG. 1A-1C show illustrative forms of the CD20-binding molecules that may represent different structural forms, including monomeric, heterodimeric, and/or homodimeric forms, such as, e.g., a homodimeric form stabilized by an inter-polypeptide disulfide bond(s) between two components of the molecule (e.g., Shiga toxin A Subunit effector regions and/or CD20 binding regions).

[0011] FIG. 2 graphically shows the sizes of different, illustrative CD20-binding molecules in different, illustrative compositions as described herein, analyzed by size exclusion chromatography (SEC). In addition, FIG. 2 shows the purity of different, illustrative compositions as described herein, analyzed by SEC. For the SEC analysis of three different samples, the absorbance of ultraviolet light at 280 nanometers (nm) of the material eluted after flowing through a SEC column in milli-absorbance units (mAU) was plotted over the elution volume (mL).

[0012] FIG. 3 shows a Coomassie-stained, sodium dodecyl sulfate, polyacrylamide gel after electrophoresis of illustrative CD20-binding molecules from illustrative CD20-binding molecules compositions prepared in either reducing or non-reducing conditions. FIG. 3 shows the sizes of different, illustrative CD20-binding molecules analyzed by gel electrophoresis, and the relative amounts or purity of proteinaceous molecules present in different, illustrative compositions.

[0013] FIG. 4 graphically shows the binding affinity characteristics of illustrative CD20-binding molecule compositions, including a monovalent CD20-binding protein composition, to CD20 positive (CD20+) human tumor-derived, cells. The mean fluorescent intensity representing the amount of cell-bound, CD20-binding protein was plotted over the sample concentration of multivalent CD20-binding protein in nanograms per milliliter (ng/mL) analyzed.

[0014] FIG. 5 graphically shows the ribosomal inhibitory activity of different, illustrative CD20-binding molecules, including a monovalent CD20-binding protein, provided as percent of zero inhibition of protein synthesis in an in vitro translation assay. The percentage of protein synthesis of zero protein synthesis activity was plotted over the logarithm to base 10 of the molar concentration in picomolar of Shiga toxin component(s) present in each sample analyzed.

[0015] FIG. 6 graphically shows the cytotoxicities of illustrative multivalent CD20-binding molecule compositions to CD20+ human derived tumor cells as compared to the cytotoxicity of a composition comprising the monovalent, CD20-binding protein component of the illustrative CD20-binding molecules of those illustrative CD20-binding molecule compositions. The percentage of viable cells was plotted over the logarithm to base 10 of CD20-binding protein concentration in nanograms per milliliter (ng/mL).

[0016] FIG. 7 graphically shows the cytotoxicity of an illustrative multivalent CD20-binding molecule composition to CD20+ human tumor-derived, cells as compared to a composition comprising the monovalent, CD20-binding protein component of the illustrative CD20-binding molecule(s) of that illustrative CD20-binding molecule composition. In addition, FIG. 7 shows the cytotoxicity of a composition comprising a mixture of monovalent and multivalent CD20-binding molecules. The percent viability of cells was plotted over the logarithm to base 10 of CD20-binding protein concentration in nanograms per milliliter (ng/mL).

[0017] FIG. 8 graphically shows the cytotoxicities of various, fixed-ratio mixtures of purified, CD20-binding protein compositions to CD20+ human tumor-derived, cells. The percent viability of cells was plotted over the logarithm to base 10 of CD20-binding protein concentration in nanograms per milliliter (ng/mL).

[0018] FIG. 9 graphically shows the cytotoxicities of an illustrative CD20-binding protein composition and fixed-ratio mixtures of purified, CD20-binding protein compositions to CD20 negative (CD20-) human tumor-derived, cells. The percent viability of cells was plotted over the logarithm to base 10 of CD20-binding protein concentration in nanograms per milliliter (ng/mL).

[0019] FIG. 10 graphically shows the cytotoxicities (in CD₅₀ concentrations) to CD20+ human tumor-derived, cells of different CD20-binding protein compositions which varied in their proportions of multivalent CD20-binding molecule(s) to monovalent CD20-binding protein. CD₅₀ values in nanograms per milliliter (ng/mL) of different, fixed-ratio, CD20-binding protein mixtures were plotted over the protein concentration percentages of (αCD20-scFv::SLT-1A)2 composition present in the sample tested. In addition, FIG. 10 shows a line which was fit to the data points using linear regression statistical modeling and the resulting coefficient of determination (R squared) of that line fit.

[0020] FIG. 11 graphically shows the cytotoxicities (in CD₅₀ concentrations) to CD20+ human tumor-derived, cells of different CD20-binding protein compositions which varied in their proportions of multivalent CD20-binding molecule(s) to monovalent CD20-binding protein. CD₅₀ values in nanograms per milliliter (ng/mL) of different, fixed ratio, CD20-binding protein mixtures were graphed over the protein concentration percentages of (αCD20-scFv::SLT-1A)2 composition present in the sample tested.

[0021] FIGS. 12A, 12B, and 12C graphically show the sizes and proportions of molecules present in different, illustrative CD20-binding molecule compositions as described herein analyzed by size exclusion chromatography (SEC). For the SEC analysis, the absorbance of ultraviolet light at 280 nm of the material eluted after flowing through a SEC column was plotted in milli-absorbance units (mAU) over the elution time (minutes). Software was used to identify individual peaks in the 280 nm trace and the retention time of each peak's maximum absorbance of ultraviolet light at 280 nm.

[0022] FIG. 13 graphically shows anti-Molecule 001 antibody levels in mice on study days 17 and 38.

[0023] FIG. 14 graphically shows anti-Molecule 001 antibody levels in primates on study days 10 and 17.

[0024] FIG. 15 shows anti-Molecule 001 antibody levels in primates. Anti-Molecule 001 antibody titer levels are plotted versus the day of study for the two primate treatment groups (Molecule 001 only, Molecule 001 plus sirolimus).

[0025] FIG. 16 graphically shows pharmacokinetic data from primates treated with Molecule 001 alone, or Molecule 001 plus sirolimus. Serum concentration of Molecule 001 (ng/mL) was plotted versus the day of study for the two primate treatment groups (Molecule 001 only, Molecule 001 plus sirolimus).

[0026] FIG. 17 graphically shows peripheral B-cell depletion in primates over the course of the study for the two primate treatment groups (Molecule 001 only, Molecule 001 plus sirolimus).

[0027] FIGS. 18A and 18B show the results of an in vitro experiment wherein various cancer cell lines were treated with Molecule 001, a chemotherapeutic agent, or a combination thereof. Fraction affected (Fa) represents the fractional response (cytotoxicity) measured in the presence of a given combination. Combination Index (CI) measures the degree of drug interaction. CA and Fa are plotted to graphically depict combinatorial responses observed.

[0028] FIG. 19A shows cytotoxicity of Molecule 001 alone or in combination with LEN on Daudi cells. FIG. 19B shows cytotoxicity of LEN alone or in combination with Molecule 001 on Daudi cells. FIG. 19C shows cell viability after treatment with LEN, Molecule 001, or a combination thereof. FIG. 19D is an isobologram depicting the synergistic toxicity of Molecule 001 on Daudi cells pre-treated with lenalidomide for 24 hours. FIG. 19E shows cytotoxicity of lenalidomide alone, Molecule 001 alone, or lenalidomide in combination with Molecule 001 on ST-486 cells.

[0029] FIG. 20 shows the design of a clinical study using Molecule 001 in combination with lenalidomide. “*” indicates that in Cohorts 4 and 5 (25 and 50 μg/kg/dose), Molecule 001 will be dosed biweekly for 2 weeks (Days 1, 5, 8, 12) for Cycles 1-2 and then once weekly for subsequent cycles. Abbreviations: LEN, lenalidomide; MTD, maximum tolerated dose; qd, once daily; TC, telephone call.

[0030] FIG. 21 provides a summary of best response and time on study for a clinical study of Molecule 001 in combination with lenalidomide. Among 5 subjects with response data available, one subject had progressive disease, one had stable disease, one had a partial response, and 2 had complete responses. Abbreviations: DLBCL, diffuse large B-cell lymphoma; FL, follicular lymphoma; GCB, germinal center B-cell; MCL, mantle cell lymphoma; NOS, not otherwise specified; SLL, small lymphocytic lymphoma.

[0031] FIG. 22A shows cytotoxicity of gemcitabine alone or in combination with different concentrations of Molecule 001 on SU-DHL-4, HBL-1, L-82, and MV-4-11 cells. FIG. 22B shows cytotoxicity of gemcitabine alone or in combination with different concentrations of Molecule 001 on Daudi, Raji, and Toledo cells.

[0032] FIG. 23 shows the minimum observed CD19+ percent change from baseline upon treatment with Molecule 001 and GemOx. Baseline is the value observed at screening. If no screening value was available, baseline was considered the value at day 8 of Cycle 1.

### DETAILED DESCRIPTION

[0033] The present invention is described more fully hereinafter using illustrative, non-limiting embodiments, and references to the accompanying figures. This invention may, however, be embodied in many different forms and should not be construed as to be limited to the embodiments set forth below. Rather, these embodiments are provided so that this disclosure is thorough and conveys the scope described herein to those skilled in the art.

[0034] In order that the present invention may be more readily understood, certain terms are defined below. Additional definitions may be found within the detailed description described herein.

[0035] As used in the specification and the appended claims, the terms “a,” “an” and “the” include both singular and the plural referents unless the context clearly dictates otherwise.

[0036] As used in the specification and the appended claims, the term “and/or” when referring to two species, A and B, means at least one of A and B. As used in the specification and the appended claims, the term “and/or” when referring to greater than two species, such as A, B, and C, means at least one of A, B, or C, or at least one of any combination of A, B, or C (with each species in singular or multiple possibility).

[0037] The term “amino acid residue” or “amino acid” includes reference to an amino acid that is incorporated into a protein, polypeptide, or peptide. The term “polypeptide” includes any polymer of amino acids or amino acid residues. The term “polypeptide sequence” refers to a series of amino acids or amino acid residues from which a polypeptide is physically composed. A “protein” is a macromolecule comprising one or more polypeptides or polypeptide “chains.” A “peptide” is a small polypeptide of sizes less than about 15 to 20 amino acid residues. The term “amino acid sequence” refers to a series of amino acids or amino acid residues which physically comprise a peptide or polypeptide depending on the length. Unless otherwise indicated, polypeptide and protein sequences disclosed herein are written from left to right representing their order from an amino terminus to a carboxy terminus.

[0038] The terms “amino acid,” “amino acid residue,” “amino acid sequence,” or polypeptide sequence include naturally occurring amino acids (including L and D isosteriomers) and, unless otherwise limited, also include known analogs of natural amino acids that can function in a similar manner as naturally occurring amino acids, such as, e.g., selenocysteine, pyrrolysine, N-formylmethionine, gamma-carboxyglutamate, hydroxyprolinehypusine, pyroglutamic acid, and selenomethionine (see e.g. Nagata K et al., Bioinformatics 30: 1681-9 (2014)). The amino acids referred to herein are described by shorthand designations as follows in Table 1.

TABLE 1
Amino Acid Nomenclature

| Name | 3-letter | 1-letter |
|---|---|---|
| Alanine | Ala | A |
| Arginine | Arg | R |
| Asparagine | Asn | N |
| Aspartic Acid or Aspartate | Asp | D |
| Cysteine | Cys | C |
| Glutamic Acid or Glutamate | Glu | E |
| Glutamine | Gln | Q |
| Glycine | Gly | G |
| Histidine | His | H |
| Isoleucine | Ile | I |
| Leucine | Leu | L |
| Lysine | Lys | K |
| Methionine | Met | M |
| Phenylalanine | Phe | F |
| Proline | Pro | P |
| Serine | Ser | S |
| Threonine | Thr | T |
| Tryptophan | Trp | W |
| Tyrosine | Tyr | Y |
| Valine | Val | V |

[0039] The phrase “conservative substitution” with regard to a polypeptide, refers to a change in the amino acid composition of the polypeptide that does not substantially alter the function and structure of the overall polypeptide (see Creighton, Proteins: Structures and Molecular Properties (W. H. Freeman and Company, New York (2nd ed., 1992))).

[0040] As used herein, the terms “expressed,” “expressing,” or “expresses,” and grammatical variants thereof, refer to translation of a polynucleotide or nucleic acid into a polypeptide and/or protein. The expressed polypeptides or proteins may remain intracellular, become a component of the cell surface membrane or be secreted into an extracellular space.

[0041] As used herein, the meaning of the phrase “CD20-expressing cell” encompasses any cell that expresses, at a cellular surface, a CD20 molecule which comprises a transmembrane domain.

[0042] As used herein, cells which express a significant amount of CD20 at least one cellular surface are “CD20 positive cells” or “CD20+ cells” and are cells physically coupled to the extracellular target biomolecule CD20.

[0043] As used herein, the symbol “a” is shorthand for an immunoglobulin-type binding region capable of binding to the biomolecule following the symbol. The symbol “a” is used to refer to the functional characteristic of an immunoglobulin-type binding region based on its capability of binding to the biomolecule following the symbol.

[0044] The terms “associated,” “associating,” “linked,” or “linking” as used herein refers to the state of two or more components of a molecule being joined, attached, connected, or otherwise coupled to form a single molecule or the act of making two molecules associated with each other to form a single molecule by creating an association, linkage, attachment, and/or any other connection between the two molecules. For example, the term “linked” may refer to two or more components associated by one or more atomic interactions such that a single molecule is formed and wherein the atomic interactions may be covalent and/or non-covalent. Non-limiting examples of covalent associations between two components include peptide bonds and cysteine-cysteine disulfide bonds. Non-limiting examples of non-covalent associations between two molecular components include ionic bonds.

[0045] For purposes as described herein, the term “linked” refer to two or more molecular components associated by one or more atomic interactions such that a single molecule is formed and wherein the atomic interaction includes at least one covalent bond. For purposes as described herein, the term “linking” refers to the act of creating a linked molecule as described above.

[0046] For purposes as described herein, the term “fused” refers to two or more proteinaceous components associated by at least one covalent bond which is a peptide bond, regardless of whether the peptide bond involves the carbon of a carboxyl acid group or involves another carbon, such as, e.g., the α-carbon, β-carbon, γ-carbon, σ-carbon, etc. Non-limiting examples of two proteinaceous components fused together include, e.g., an amino acid, peptide, or polypeptide fused to a polypeptide via a peptide bond such that the resulting molecule is a single, continuous polypeptide. For purposes as described herein, the term “fusing” refers to the act of creating a fused molecule as described above, such as, e.g., a fusion protein generated from the recombinant fusion of genetic regions.

[0047] The symbol “::” means the polypeptide regions before and after it are physically linked together to form a continuous polypeptide.

[0048] For purposes as described herein, the term “effector” means providing a biological activity, such as cytotoxicity, biological signaling, enzymatic catalysis, subcellular routing, and/or intermolecular binding resulting in the recruitment of one or more factors and/or allosteric effect(s).

[0049] As used herein, the phrase “multivalent CD20-binding molecule” refers to a CD20-binding molecule or plurality of CD20-binding molecules comprising two or more high-affinity CD20 binding regions, such as, e.g. a protein comprising two or more CD20 binding regions where each individual binding region has a dissociation constant of 10⁻⁵ to 10⁻¹² moles per liter toward an extracellular part of CD20.

[0050] As used herein, the phrase “multivalent CD20-binding protein” refers to a CD20-binding protein molecule or plurality of CD20-binding protein molecules comprising two or more high-affinity CD20 binding regions, such as, e.g. a protein comprising two or more CD20 binding regions where each individual binding region has a dissociation constant of 10⁻⁵ to 10⁻¹² moles/liter toward an extracellular part of CD20.

[0051] With regard to a Shiga toxin protein sequence, the term “wild-type” as used herein refers to a naturally occurring, Shiga toxin protein sequence(s) found in a living species, such as, e.g., a pathogenic bacterium, wherein that Shiga toxin protein sequence(s) is one of the most frequently occurring variants. This is in contrast to infrequently occurring Shiga toxin protein sequences that, while still naturally occurring, are found in less than one percent of individual organisms of a given species out of individual organisms of that same species when sampling a statistically powerful number of naturally occurring individual organisms of that species which comprise at least one Shiga toxin protein variant. A clonal expansion of a natural isolate outside its natural environment (regardless of whether the isolate is an organism or molecule comprising biological sequence information) does not alter the naturally occurring requirement as long as the clonal expansion does not introduce new sequence variety not present in naturally occurring populations of that species and/or does not change the relative proportions of sequence variants to each other.

[0052] For purposes as described herein, the phrase “derived from” means that the polypeptide region comprises amino acid sequences originally found in a protein and which may now comprise additions, deletions, truncations, rearrangements, or other alterations relative to the original sequence as long as the overall function and structure are substantially conserved.

[0053] For purposes as described herein, a Shiga toxin effector function is a biological activity conferred by a polypeptide region derived from a Shiga toxin A Subunit. Non-limiting examples of Shiga toxin effector functions include cellular internalization, subcellular routing, catalytic activity, and cytotoxicity. Shiga toxin catalytic activities include, for example, ribosome inactivation, protein synthesis inhibition, N-glycosidase activity, polynucleotide:adenosine glycosidase activity, RNAase activity, and DNAase activity. Shiga toxins are ribosome inactivating proteins (RIPs). RIPs can depurinate nucleic acids, polynucleosides, polynucleotides, rRNA, ssDNA, dsDNA, mRNA (and polyA), and viral nucleic acids (see e.g. Brigotti M et al., Toxicon 39: 341-8 (2001); Brigotti M et al., FASEB J 16: 365-72 (2002)). Some RIPs show antiviral activity and superoxide dismutase activity. Shiga toxin catalytic activities have been observed both in vitro and in vivo. Non-limiting examples of assays for Shiga toxin effector activity measure protein synthesis inhibitory activity, depurination activity, inhibition of cell growth, cytotoxicity, supercoiled DNA relaxation activity, and nuclease activity.

[0054] The term “IC50” or “IC₅₀” is used herein to refer to the half-maximal inhibitory concentration as measured using in an in vitro ribosome function assay. The term “CD₅₀” or “CD₅₀” is used herein to refer to the half-maximal cytotoxicity concentration in an in vitro cell killing and/or survival assay. The skilled artisan will readily understand the meaning of each of these terms, when taken in context. Each of IC₅₀, and CD₅₀ may be measured by generating a multiple data points using different molecule concentrations or a concentration series. For some samples, accurate values for either IC₅₀ or CD₅₀ might be unobtainable due to the inability to collect the required data points for an accurate curve fit. For example, theoretically, neither an IC₅₀ nor CD₅₀ can be determined if greater than 50% ribosome inhibition or cell death, respectively, does not occur in a concentration series for a given sample. Data insufficient to accurately fit a curve should not be considered as representative of actual molecule activity.

[0055] As used herein, the retention of Shiga toxin effector function refers to a level of Shiga toxin functional activity, as measured by an appropriate quantitative assay with reproducibility comparable to a wild-type Shiga toxin effector polypeptide region control. For ribosome inhibition, Shiga toxin effector function is exhibiting an IC₅₀ of 10,000 picomolar (pM) or less. For cytotoxicity in a target positive cell kill assay, Shiga toxin effector function is exhibiting a CD₅₀ of 1,000 nanomolar (nM) or less, depending on the cell type and its expression of the appropriate extracellular CD20 target biomolecule.

[0056] As used herein, the retention of “significant” Shiga toxin effector function refers to a level of Shiga toxin functional activity, as measured by an appropriate quantitative assay with reproducibility comparable to a wild-type Shiga toxin effector polypeptide control. For in vitro ribosome inhibition, significant Shiga toxin effector function is exhibiting an IC₅₀ of 300 pM or less depending on the source of the ribosomes (e.g. bacteria, archaea, or eukaryote (algae, fungi, plants, or animals)). This is significantly greater inhibition as compared to the approximate IC₅₀ of 100,000 pM for the catalytically inactive SLT-1A 1-251 double mutant (Y77S/E167D). For cytotoxicity in a target positive cell kill assay in laboratory cell culture, significant Shiga toxin effector function is exhibiting a CD₅₀ of 100, 50, or 30 nM or less, depending on the cell line and its expression of the appropriate extracellular CD20 target biomolecule. This is significantly greater cytotoxicity to the appropriate target cell line as compared to an SLT-1A subunit alone, without a cell targeting binding region, which has a CD₅₀ of 100-10,000 nM, depending on the cell line.

[0057] For some samples, accurate values for either IC₅₀ or CD₅₀ might be unobtainable due to the inability to collect the required data points for an accurate curve fit. For example, theoretically, neither an IC₅₀ nor CD₅₀ can be determined if greater than 50% ribosome inhibition or cell death, respectively, does not occur in a concentration series for a given sample. Inaccurate IC₅₀ and/or CD₅₀ values should not be considered when determining significant Shiga toxin effector function activity. Data insufficient to accurately fit a curve as described in the analysis of the data from illustrative Shiga toxin effector function assays, such as, e.g., assays described in the Examples, infra, should not be considered as representative of actual Shiga toxin effector function.

[0058] A failure to detect activity in Shiga toxin effector function may be due to improper expression, polypeptide folding, and/or polypeptide stability rather than a lack of cell entry, subcellular routing, and/or enzymatic activity. Assays for Shiga toxin effector functions may not require much CD20-binding molecule described herein to measure significant amounts of Shiga toxin effector function activity. To the extent that an underlying cause of low or no effector function is determined empirically to relate to protein expression or stability, one of skill in the art may be able to compensate for such factors using protein chemistry and molecular engineering techniques known in the art, such that a Shiga toxin functional effector activity may be restored and measured. As examples, improper cell-based expression may be compensated for by using different expression control sequences; improper polypeptide folding and/or stability may benefit from stabilizing terminal sequences, or compensatory mutations in non-effector regions which stabilize the three-dimensional structure of the protein, etc. When new assays for individual Shiga toxin functions become available, Shiga toxin effector regions or polypeptides may be analyzed for any level of those Shiga toxin effector functions, such as for being within a certain-fold activity of a wild-type Shiga toxin effector polypeptide. Examples of meaningful activity differences are, e.g., Shiga toxin effector polypeptide regions that have 1000-fold or 100-fold or less the activity of a wild-type Shiga toxin effector polypeptide; or that have 3-fold to 30-fold or more activity compared to a functional knock-down or knockout Shiga toxin effector polypeptide.

[0059] Certain Shiga toxin effector functions are not easily measurable, e.g. subcellular routing functions. Currently there is no routine, quantitative assay to distinguish whether the failure of a Shiga toxin effector polypeptide to be cytotoxic is due to improper subcellular routing, but at a time when tests are available, Shiga toxin effector polypeptides may be analyzed for any significant level of subcellular routing as compared to the appropriate wild-type Shiga toxin effector polypeptide region.

[0060] It should be noted that even if the cytotoxicity of a Shiga toxin effector polypeptide is reduced relative to wild-type, in practice, applications using attenuated, Shiga toxin effector polypeptides may be equally or more effective than those using wild-type, Shiga toxin effector polypeptides because the highest potency variants might exhibit undesirable effects which are minimized or reduced in reduced-potency variants. Wild-type Shiga toxin effector polypeptides are very potent, being able to kill with only one molecule reaching the cytosol or perhaps 40 molecules being internalized (Tam P, Lingwood C, Microbiology 153: 2700-10 (2007)). Shiga toxin effector polypeptides with even considerably reduced Shiga toxin effector functions, such as, e.g., subcellular routing or cytotoxicity, as compared to wild-type Shiga toxin effector polypeptides may still be potent enough for practical applications involving targeted cell killing and/or detection of certain subcellular compartments of specific cell types. And such effector polypeptides may also be useful for delivering cargos (e.g. additional exogenous material) to certain intracellular locations or subcellular compartments.

[0061] The term “selective cytotoxicity” with regard to the cytotoxic activity of a cytotoxic CD20-binding molecule refers to the relative levels of cytotoxicity between a targeted cell population and a non-targeted bystander cell population, which can be expressed as a ratio of the half-maximal cytotoxic concentration (CD₅₀) for a targeted cell type over the CD₅₀ for an untargeted cell type to show the preferentiality of cell killing of the targeted cell type as a metric for selectivity.

[0062] As used in the specification and the claims herein, the phrase “physiological temperature appropriate for the cell” refers to temperatures known in the art and/or identifiable by the skilled worker which fall within a range suitable for healthy growth, propagation, and/or function of that particular cell or cell type; corresponding to the core temperature of the species from which the cell is derived; and/or corresponding to a healthy, living organism comprising the cell. For example, temperatures around 37° C. are appropriate for many mammalian cells depending on the species.

[0063] For purposes as described herein, the phrase “internalization of a molecular complex comprising the CD20-binding molecule bound to CD20” means the cellular internalization of the CD20-binding molecule is CD20-mediated in that the internalization begins with CD20-binding molecule and cell-surface CD20 forming a complex at an extracellular position and ends with both the CD20-binding molecule and CD20 molecule(s) entering the cell prior to dissociation of the CD20-binding molecule from CD20 molecule(s) to which the CD20-binding molecule has bound.

[0064] For purposes as described herein, the phrase “CD20 natively present on the surface of a cell” means a cell expresses the CD20 molecule using its own protein synthesis machinery and localizes the CD20 molecule to a cellular surface using its own intracellular routing machinery such that the CD20 molecule is physically coupled to said cell and at least a part of the CD20 molecule is accessible from an extracellular space, i.e. on the surface of a cell.

[0065] For the purposes of certain embodiments as described herein, cellular internalization is considered rapid if the time for internalization to occur due to the binding of the CD20-binding molecule as described herein is reduced as compared to the time for internalization of a prior art reference molecule at the same percent CD20 occupancy as determined by the same assay using the same cell type at the same temperature.

[0066] As used in the specification and the claims herein, the phrase “rapid cellular internalization” refers to the ability of a CD20-binding molecule as described herein to decrease the time on average for cellular internalization of an extracellular CD20 antigen or cell surface localized CD20 molecule as compared to the time on average required for cellular internalization of an extracellular CD20 antigen or cell surface localized CD20 molecule, as measured by any one of a number of cell internalization assays known in the art or described herein.

[0067] As used in the specification and the claims herein, the phrase “rapid internalization” includes internalization which may be assayed as compared to a basal CD20 internalization rate and/or molecular binding induced internalization rate for CD20 after administration of an immunoglobulin-type binding molecule (e.g. a monoclonal antibody) known in the art to bind an extracellular part of CD20. The scope of the phrase “rapid cellular internalization” is intended to encompass internalization rates, on average, faster than those observed when testing a CD20-specific antibody or immunoglobulin-derived protein molecule with an Fc region. In general, an internalization rate constant may be defined as the time after administration of a CD20-specific binding molecule of interest to CD20 positive cells at which 50% of cell surface CD20 antigens, CD20 molecules, and/or the CD20-specific binding molecule is internalized at a given administered concentration, mass, molarity, or CD20 occupancy-adjusted concentration, to a particular cell type, and at a particular temperature. Cell-surface CD20 internalization, whether basally or in response to administration of a CD20-binding molecule, may be assayed by various methods known to the skilled worker.

[0068] For the purposes of certain embodiments as described herein, cellular internalization is considered rapid if the time for internalization to occur due to the binding of the CD20-binding molecule as described herein is reduced as compared to the time for internalization of the target CD20 molecule with the binding of a well-characterized antibody recognizing a CD20 antigen, such as the αCD20 monoclonal antibody 1H4 (Haisma H et al., Blood 92: 184-90 (1999)). For example, internalization timing for the CD20 antigen, although variable for cell type and antibody type, does not typically begin to reach maximal levels until approximately six hours or more after binding. Thus the term “rapid” as used throughout the present description is intended to indicate that a CD20-binding molecule as described herein enters one or more CD20-expressing and/or CD20 positive cells in less than six hours. In some embodiments, rapid can be as quickly as less than about thirty minutes, but can also encompass a range of from about 1 hour to about 2 hours, to about 3 hours, to about 4 hours, to about 5 hours; a range of about 2 hours to about 3 hours, to about 4 hours, to about 5 hours; a range of about 3 hours to about 4 hours, to about 5 hours; and a range of about 4 hours to about 5 hours.

[0069] For purposes as described herein, the phrase “one or more non-covalent linkages,” with regard to a molecule comprising two or more components linked together, includes the types of linkages connecting the components that in certain molecules may be observed as being eliminated (i.e., no longer connecting two or more components) when changing the molecule from native protein-folding conditions to protein-denaturing conditions. For example, when using techniques known in the art and/or described herein, such as, e.g., electrophoretic and/or chromatographic assays, for assaying the sizes of proteinaceous molecules, a multi-component molecule that appears as a single-sized species under native protein-folding conditions (e.g. pH-buffered environments intended to be similar to the lumen of the endoplasmic reticulum of a eukaryotic cell or to an extracellular environment within an organism), can also be observed as being composed of two or more smaller-sized, proteinaceous molecules under denaturing conditions and/or after being subjected to a denaturing condition. “Protein-denaturing” conditions are known to the skilled worker and include conditions markedly different from native protein-folding conditions, such as, e.g., environments with a high temperature (e.g., greater than 50 degrees Celsius) and/or those characterized by the presence of chemical denaturants and/or detergents, such as, e.g., 1-10% sodium dodecyl sulfate, polysorbates, Triton® X-100, sarkosyl, and other detergents whether ionic, non-ionic, zwitterionic, and/or chaotropic.

[0070] As used herein, the term “monomeric” with regard to describing a protein and/or proteinaceous molecule refers to a molecule comprising only one polypeptide component consisting of a single, continuous polypeptide, regardless of its secondary or tertiary structure, which may be synthesized by a ribosome from a single polynucleotide template, including a continuous linear polypeptide which later forms a cyclic structure. In contrast, a multimeric molecule may comprise two or more polypeptides (e.g. subunits) which together do not form a single, continuous polypeptide that may be synthesized by a ribosome from a single polynucleotide template is multimeric.

[0071] As used herein, the term “multimeric” with regard to describing a protein and/or proteinaceous molecule refers to a molecule that comprises two or more, individual, polypeptide components associated together and/or linked together, such as, e.g., a molecule consisting of two components each of which is its own continuous polypeptide. For example, the association or linkage between components of a molecule may include 1) one or more non-covalent interactions; 2) one or more post-translational, covalent interactions; 3) one or more, covalent chemical conjugations; and/or 4) one or more covalent interactions resulting in a single molecule comprising a non-linear polypeptide, such as, e.g., a branched or cyclic polypeptide structure, resulting from the arrangement of the two or more polypeptide components. A molecule comprising two, discontinuous polypeptides as a result of the proteolytic cleavage of one or more peptide bonds in a single, continuous polypeptide synthesized by a ribosome from a single polynucleotide templates is “multimeric” and not “monomeric.”

[0072] As used herein, the phrase “CD20-binding molecule composition” refers to a composition comprising at least one type of CD20-binding molecule, and, may commonly comprise two or more types of CD20-binding molecule, wherein each type of CD20-binding molecule has a reproducibly measurable representation in the composition, e.g., of at least one percent (by mass) of the most abundant type of CD20-binding molecule. A composition comprising only one type of CD20-binding molecule with no other type of proteinaceous molecule present (e.g. a composition comprising one hundred percent of a single type of CD20-binding molecule of the total proteinaceous molecule(s) present) is encompassed by the phrase “CD20-binding molecule composition.”

[0073] The term “about” when immediately preceding a numerical value means±up to 20% of the numerical value. For example, “about” a numerical value means±up to 20% of the numerical value, in some embodiments, ±up to 19%, ±up to 18%, ±up to 17%, ±up to 16%, ±up to 15%, ±up to 14%, ±up to 13%, ±up to 12%, ±up to 11%, ±up to 10%, ±up to 9%, ±up to 8%, ±up to 7%, ±up to 6%, ±up to 5%, ±up to 4%, ±up to 3%, ±up to 2%, ±up to 1%, ±up to less than 1%, or any other value or range of values therein.

[0074] The term “pharmaceutically acceptable salt” means an acid addition salt of a basic active agent, including a basic antimicrobial agent, or a base addition salt of an acidic active agent, including an acidic antimicrobial agent.

[0075] Basic molecules that form an acid addition salt include, for example, those comprising an amino group. Illustrative inorganic acids that form acid addition salts with basic molecules include hydrochloric, hydrobromic, sulfuric, nitric and phosphoric acids, as well as acidic metal salts such as sodium monohydrogen orthophosphate and potassium hydrogen sulfate. Illustrative organic acids that form acid addition salts with basic molecules include mono-, di- and tricarboxylic acids. Illustrative of such organic acids are, for example, acetic, trifluoroacetic, propionic, glycolic, lactic, pyruvic, malonic, succinic, glutaric, fumaric, malic, oxalic, tartaric, citric, ascorbic, maleic, hydroxymaleic, benzoic, hydroxybenzoic, phenylacetic, cinnamic, mandelic, salicylic, 2-phenoxybenzoic, isethionic, p-toluenesulfonic acid and other sulfonic acids such as methanesulfonic acid, ethanesulfonic acid and 2-hydroxyethanesulfonic acid. Either the mono- or di-acid salts can be formed, and such salts can exist in either a hydrated, solvated or substantially anhydrous form.

[0076] Acidic molecules that form a base addition salt include, for example, compounds comprising a carboxylic acid group. Illustrative inorganic bases that form base addition salts with acidic acid agents include lithium, sodium, potassium, calcium, magnesium or barium hydroxides, carbonates and bicarbonates, as well as ammonia. Illustrative organic bases that form base addition salts with acidic molecules include aliphatic, alicyclic or aromatic organic amines such as isopropylamine, methylamine, trimethylamine, picoline, diethylamine, triethylamine, tripropylamine, ethanolamine, 2-dimethylaminoethanol, 2-diethylaminoethanol, dicyclohexylamine, lysine, arginine, histidine, caffeine, procaine, hydrabamine, choline, EGFRaine, ethylenediamine, glucosamine, methylglucamine, theobromine, purines, piperazine, piperidine, N-ethylpiperidine, polyamine resins, and the like. Illustrative organic bases are isopropylamine, diethylamine, ethanolamine, trimethylamine, dicyclohexylamine, choline, and caffeine (see e.g. Berge S et al., J Pharm Sci 66, 1-19 (1977)).

[0077] The formation of a desired compound salt is achieved using standard techniques. For example, the neutral compound is treated with an acid or base in a suitable solvent and the formed salt is isolated by filtration, extraction or any other suitable method.

### CD20-Binding Molecules and Methods of Use Thereof

[0078] Provided herein are methods for treating or slowing the progression of a disease, disorder, or condition, comprising administering to a subject in need thereof an effective amount of (i) a CD20-binding molecule and (ii) at least one additional therapeutic agent, wherein the CD20-binding molecule comprises (a) a CD20-binding region, wherein the CD20-binding region is capable of specifically binding an extracellular portion of a CD20 protein, and b) a Shiga toxin effector polypeptide region (the CD20-binding molecule being a “CD20-binding molecule as described herein”). In some embodiments, the CD20-binding molecule as described herein is multivalent. In certain other embodiments, the CD20-binding molecule as described herein is monovalent.

[0079] In some embodiments, a method for treating or slowing the progression of a disease, disorder, or condition comprises administering to a subject in need thereof an effective amount of: (i) a CD20-binding molecule; and (ii) one or more additional therapeutic agents; wherein the CD20-binding molecule comprises a polypeptide having the sequence of SEQ ID NO: 54. In some embodiments, the CD20-binding molecule is a homodimer comprising two identical polypeptides. In some embodiments, each identical polypeptide has the amino acid sequence of SEQ ID NO: 54; and wherein there is a disulfide bond at each cysteine residue at amino acid position 503 of SEQ ID NO: 54.

[0080] In addition, provided are compositions comprising an effective amount of a CD20-binding molecule as described herein and an additional therapeutic agent. Described herein is the discovery that illustrative CD20-binding molecules and CD20-binding molecule compositions as described herein are cytotoxic to CD20-expressing cells (see Examples, infra). The ability to deliver a therapeutic into a target cell and kill it is convincing proof of cellular internalization (Mazor Y et al., J Immunol Methods 321: 41-59 (2007)). Furthermore, the potency of target cell kill can be correlated with the efficiency of cellular internalization (Pirie C et al., J Biol Chem 286: 4165-72 (2011)).

[0081] As described in more detail in the Examples, certain illustrative multivalent CD20-binding molecules, and enriched compositions thereof, exhibit unexpectedly cytotoxic potencies compared to what was measured using equivalent amounts of a monovalent CD20-binding variant, and certain compositions thereof. Without being bound by theory, multivalent CD20-binding molecules as described herein, and compositions thereof, may possess the improved ability(ies) of: internalizing into CD20-expressing cells, intracellularly routing to a certain subcellular compartment(s), and/or delivering an active toxin effector polypeptide region (e.g. a Shiga toxin A Subunit effector polypeptide) to the cytosol as compared to certain 1) monovalent CD20-binding molecules and compositions thereof, 2) multivalent CD20-binding molecules lacking a toxin effector region(s) (e.g. a Shiga toxin A Subunit effector polypeptide), and/or compositions comprising another CD20-binding molecule comprising a Shiga toxin A Subunit effector polypeptide to total CD20-binding molecule.

### I. The General Structure of the CD20-Binding Molecules as Described Herein

[0082] Provided herein are various CD20-binding molecules for targeted cellular internalization into CD20-expressing cell types. In some embodiments, a CD20-binding molecule as described herein comprises 1) a CD20 binding region capable of specifically binding an extracellular part of CD20 and 2) at least one Shiga toxin effector region comprising a polypeptide derived from the amino acid sequence of an A Subunit of at least one member of the Shiga toxin family. Also provided herein are various compositions comprising an effective amount of a CD20-binding molecule and an additional therapeutic agent.

[0083] In some embodiments, the binding molecule is a homo-dimer or a hetero-dimer. In some embodiments, the binding molecule is a homo-dimer comprising two monomers, wherein each monomer comprises a CD20 binding region and a Shiga toxin effector polypeptide. In some embodiments, a dimeric binding molecule exhibits properties which are more favorable than the properties of a monomeric variant comprising identical binding region and toxin region.

[0084] Some of the CD20-binding molecules described herein can induce rapid cellular internalization of CD20 (e.g., CD20 natively present on the surface of a cell). Upon binding a CD20 antigen on the surface of a cell, the CD20-binding molecules described herein are capable of inducing rapid cellular internalization of the complex comprising of the CD20-binding molecule and a CD20 antigen into the interior of a eukaryotic cell. In some embodiments, the CD20-binding molecules are capable of inducing, in less than about one hour, cellular internalization of a CD20 natively present on the surface of a cell. In some embodiments, the CD20-binding molecules are capable of inducing, in less than about one hour, cellular internalization of a CD20 natively present on the surface of a member of a B-cell lineage.

[0085] The linking of CD20 binding regions with Shiga-toxin-Subunit-A-derived polypeptides enables the engineering of cytotoxic Shiga-toxin based molecules that are capable of inducing rapid cellular internalization of natively expressed CD20, as well as capable of delivering additional exogenous materials into the interior of CD20 expressing cells. The CD20-binding molecules have uses, e.g., for targeted killing of CD20 positive cell types, delivering exogenous materials, as diagnostic agents, and as therapeutics for the treatment of a variety of conditions in subjects, such as cancers, tumors, and immune disorders related to B-cell lineages and/or involving a CD20-expressing cell type.

[0086] Some of the CD20-binding molecules described herein, and compositions thereof, are cytotoxic and others are not, such as, e.g., for labeling the interiors of CD20-expressing cells. Certain CD20-binding molecules as described herein, and compositions thereof, can deliver additional exogenous materials into CD20-expressing cells and may or may not result in cytotoxicity independent of the activity of the Shiga toxin effector polypeptide region(s).

[0087] In some embodiments, upon administration of the CD20-binding molecule to a cell which expresses CD20 on a cellular surface, the CD20-binding molecules are capable of causing the death of the cell. In certain other embodiments, the CD20-binding molecules comprise Shiga toxin effector regions that lack catalytic activity and are not capable of causing the death of a cell.

[0088] In some embodiments, upon administration of the CD20-binding molecule to a first populations of cells whose members express CD20, and a second population of cells whose members do not express CD20, the cytotoxic effect of the CD20-binding molecule to members of the first population of cells relative to members of the second population of cells is at least 3-fold greater.

### A. CD20 Binding Regions of the CD20-Binding Molecules as Described Herein

[0089] The CD20-binding molecule as described herein comprises a CD20 binding region wherein each binding region comprises a peptide or polypeptide region capable of binding specifically to an extracellular part of a CD20 molecule. In some embodiments, the CD20-binding molecule comprises two or more CD20 binding regions wherein each binding region comprises a peptide or polypeptide region capable of binding specifically to an extracellular part of a CD20 molecule in physical association with a cell. The CD20 binding region may comprise one or more various peptidic or polypeptide moieties, such as randomly generated peptide sequences, naturally occurring ligands or derivatives thereof, immunoglobulin-derived domains, engineered scaffolds as alternatives to immunoglobulin domains, and the like.

[0090] In some embodiments, the CD20 binding region comprises the polypeptide comprising, consisting essentially of, or consisting of the binding region that includes autonomous V_{H} domains, single-domain antibody domains (sdAbs), heavy-chain antibody domains derived from camelids (V_{H}H fragments or V_{H} domain fragments), heavy-chain antibody domains derived from camelid V_{H}H fragments or V_{H} domain fragments, heavy-chain antibody domains derived from cartilaginous fishes, immunoglobulin new antigen receptors (IgNARs), V_{NAR} fragments, single-chain variable (scFv) fragments, nanobodies, Fd fragments consisting of the heavy chain and C_{H}1 domains, permutated Fvs (pFv), single chain Fv-C_{H}3 minibodies, dimeric C_{H}2 domain fragments (C_{H}2D), Fc antigen binding domains (Fcabs), isolated complementary determining region 3 (CDR3) fragments, constrained framework region 3, CDR3, framework region 4 (FR3-CDR3-FR4) polypeptides, small modular immunopharmaceutical (SMIP) domains, scFv-Fc fusions, multimerizing scFv fragments (diabodies, triabodies, tetrabodies), disulfide stabilized antibody variable (Fv) fragments, disulfide stabilized antigen-binding (Fab) fragments consisting of the V_{L}, V_{H}, C_{L} and C_{H}1 domains, bivalent nanobodies, bivalent minibodies, bivalent F(ab′)₂ fragments (Fab dimers), bispecific tandem V_{H}H fragments, bispecific tandem scFv fragments, bispecific nanobodies, bispecific minibodies, and any genetically manipulated counterparts of the foregoing that retains its binding functionality (see e.g. Wörn A, Plückthun A, J Mol Biol 305: 989-1010 (2001); Xu L et al., Chem Biol 9: 933-42 (2002); Wikman M et al., Protein Eng Des Sel 17: 455-62 (2004); Binz H et al., Nat Biotechnol 23: 1257-68 (2005); Hey T et al., Trends Biotechnol 23:514-522 (2005); Holliger P, Hudson P, Nat Biotechnol 23: 1126-36 (2005); Gill D, Damle N, Curr Opin Biotech 17: 653-8 (2006); Koide A, Koide S, Methods Mol Biol 352: 95-109 (2007); Byla P et al., J Biol Chem 285: 12096 (2010); Zoller F et al., Molecules 16: 2467-85 (2011); Alfarano P et al., Protein Sci 21: 1298-314 (2012); Madhurantakam C et al., Protein Sci 21: 1015-28 (2012); Varadamsetty G et al., J Mol Biol 424: 68-87 (2012); Reichen C et al., J Struct Biol 185: 147-62 (2014)).

[0091] In some embodiments, the CD20-binding molecule comprises a CD20 binding region which is an scFv comprising a V_{H} domain and a V_{L} domain. In some embodiments, the scFv comprises a linker which connects the V_{H} domain and the V_{L} domain. In some embodiments, the CD20 binding region is an anti-CD20 scFv comprising an amino acid sequence with at least 90%, at least 95%, at least 96%, at least 97%, at least 98%, or at least 99% identity to SEQ ID NO: 375. In some embodiments, the CD20 binding region is an anti-CD20 scFv comprising the amino acid sequence of SEQ ID NO: 375. In some embodiments, the CD20 binding region is an anti-CD20 scFv comprising the amino acid sequence of SEQ ID NO: 375 with one or more mutations relative thereto. For example, in some embodiments, the CD20 binding region comprises 1, 2, 3, 4, 5, 6, 7, 8, 9, 10, or more mutations relative to SEQ ID NO: 375. In some embodiments, the CD20 binding region is an anti-CD20 scFv comprising the amino acid sequence of SEQ ID NO: 375 with 1-5, 5-10, 11-5, 15-20, 10-25, 25-30, or more than 30 mutations. In some embodiments, the V_{H} domain of the anti-CD20 scFv comprises an amino acid sequence with at least 90%, at least 95%, at least 96%, at least 97%, at least 98%, or at least 99% identity to SEQ ID NO: 376. In some embodiments, the V_{H} domain of the anti-CD20 scFv comprises the amino acid sequence of SEQ ID NO: 376. In some embodiments, the V_{H} domain of the anti-CD20 scFv comprises the amino acid sequence of SEQ ID NO: 376 with one or more mutations relative thereto. For example, in some embodiments, the V_{H} domain comprises 1, 2, 3, 4, 5, 6, 7, 8, 9, 10, or more mutations relative to SEQ ID NO: 376. In some embodiments, the V_{H} domain of anti-CD20 scFv comprises the amino acid sequence of SEQ ID NO: 376 with 1-5, 5-10, 11-5, 15-20, 10-25, 25-30, or more than 30 mutations. In some embodiments, the V_{L} domain of the anti-CD20 scFv comprises an amino acid sequence with at least 90%, at least 95%, at least 96%, at least 97%, at least 98%, or at least 99% identity to SEQ ID NO: 377. In some embodiments, the V_{L} domain of the anti-CD20 scFv comprises the amino acid sequence of SEQ ID NO: 377. In some embodiments, the V_{L} domain of the anti-CD20 scFv comprises the amino acid sequence of SEQ ID NO: 377 with one or more mutations relative thereto. For example, in some embodiments, the V_{L} domain comprises 1, 2, 3, 4, 5, 6, 7, 8, 9 or 10 relative to SEQ ID NO: 377. In some embodiments, the V_{L} domain of the anti-CD20 scFv comprises the amino acid sequence of SEQ ID NO: 377 with 1-5, 5-10, 11-5, 15-20, 10-25, 25-30, or more than 30 mutations.

[0092] As used herein, the term “CD20 binding region” refers to a proteinaceous (e.g., peptidic and/or polypeptide) region of a molecule as described herein which is capable of specifically binding an extracellular part of a CD20 molecule with high affinity, such as, e.g., having a dissociation constant with regard to CD20 of 10⁻⁵ to 10⁻¹² moles per liter.

[0093] In some embodiments, the binding region of a CD20-binding molecule comprises a polypeptide capable of selectively and specifically binding an extracellular part of a CD20 expressed at a cellular surface and in physical association with a cell. In some embodiments, the CD20 binding region comprises a naturally occurring ligand of a CD20 molecule or derivative thereof that retains binding functionality to an extracellular part of CD20. In some embodiments, the CD20 binding region comprises a synthetic ligand capable of binding to an extracellular part of CD20 with high affinity.

[0094] While the name CD20 may refer to multiple proteins with related structures and polypeptide sequences from various species, as used herein, the term “CD20” refers to the B-lymphocyte antigen CD20 proteins present in mammals whose exact sequence might vary slightly based on the isoform and from individual to individual. Alternative names for CD20, as recognized in the art, include B-lymphocyte surface antigen Bl, Leu-16 and Bp35. For example, in humans CD20 typically refers to the protein represented by the predominant polypeptide sequence UnitProt P11836 and NCBI accession NP 690605.1; however, different isoforms and variants may exist. The polypeptide sequences of CD20 proteins from various species have been described, such as from bats, cats, cattle, dogs, mice, marmosets, and rats, and can be predicted by bioinformatics in numerous other species based on genetic homology (e.g. CD20 has been predicted in various primates, including baboons, macaques, gibbons, chimpanzees, and gorillas) (see NCBI protein database (National Center for Biotechnology Information, U.S.)). A skilled worker will be able to identify a CD20 related protein in mammals, even if it differs from the referenced sequences.

[0095] CD20 is expressed by B-cells within certain cell developmental stages that give rise to non-Hodgkins lymphoma (NHL) and chronic lymphocytic leukemia (CLL); however, CD20 is not expressed on hematopoietic stem cells or on mature plasma cells (van Meerten T et al., Clin Cancer Res 12: 4027-35 (2006)). An attractive characteristic of CD20 is that it represents a quasi-universal target of lymphoma cells for being expressed on approximately 90% of B-cell non-Hodgkin lymphomas (Anderson K et al., Blood 63: 2825-33 (1984); Press O et al., Cancer Res 49: 4906-12 (1989); Press O et al., Blood. 83: 1390-7 (1994); Manches O et al., Blood 101: 949-54 (2003)). Additional attractive characteristics of CD20 are its high expression on the plasma membrane of lymphoma cells and its multiple extracellular CD20 antigenic epitopes in close proximity to the plasma membrane (Teeling J et al., J Immunol 177: 362-71 (2006); Lim S et al., Haematologica 95: 135-43 (2010)).

[0096] An extracellular part of a CD20 molecule refers to a portion of its structure exposed to the extracellular environment when the CD20 molecule is present in a cell membrane, such as, e.g., CD20 molecules natively expressed at a cellular surface. In this context, exposed to the extracellular environment means that part of the CD20 molecule is accessible by, e.g., an antibody or at least a binding moiety smaller than an antibody such as a single-domain antibody domain, a nanobody, a heavy-chain antibody domain derived from camelids or cartilaginous fishes, a single-chain variable fragment, or any number of engineered alternative scaffolds to immunoglobulins (see below). The exposure to the extracellular environment of or accessibility to a part of CD20 physically coupled to a cell may be empirically determined by the skilled worker using methods well known in the art. Note that some portion of CD20, which was predicted not to be accessible to an antibody in the extracellular space based on its epitope location within CD20, was empirically shown to be accessible by a monoclonal antibody (Teeling J et al., J. Immunol. 177: 362-71 (2006)).

[0097] CD20 binding regions may be derived from antibody or antibody-like structures; however, alternative scaffolds from other sources are contemplated as a source of CD20 binding regions within the scope as described herein. In some embodiments, the CD20 binding region is derived from an immunoglobulin-derived binding region, such as an antibody paratope. In some embodiments, the CD20 binding region comprises an immunoglobulin-type binding region that is an engineered polypeptide not derived from any immunoglobulin domain.

[0098] In some embodiments, the CD20 binding region may comprise an immunoglobulin-type binding region. The term “immunoglobulin-type binding region” as used herein refers to a polypeptide region capable of binding one or more target biomolecules, such as an antigen or epitope. Immunoglobulin-type binding regions are functionally defined by their ability to bind to target molecules, such as CD20. Immunoglobulin-type binding regions are commonly derived from antibody or antibody-like structures; however, alternative scaffolds from other sources are contemplated within the scope of the term.

[0099] Immunoglobulin (Ig) proteins have a structural domain known as an Ig domain. Ig domains range in length from about 70-110 amino acid residues and possess a characteristic Ig-fold, in which typically 7 to 9 antiparallel beta strands arrange into two beta sheets which form a sandwich-like structure. The Ig fold is stabilized by hydrophobic amino acid interactions on inner surfaces of the sandwich and highly conserved disulfide bonds between cysteine residues in the strands. Ig domains may be variable (IgV or V-set), constant (IgC or C-set) or intermediate (IgI or I-set). Some Ig domains may be associated with a complementarity determining region or complementary determining region (CDR), also referred to as antigen binding region (ABR), which is important for the specificity of antibodies binding to their epitopes. Ig-like domains are also found in non-immunoglobulin proteins and are classified on that basis as members of the Ig superfamily of proteins. The HUGO Gene Nomenclature Committee (HGNC) provides a list of members of the Ig-like domain containing family.

[0100] As used herein, the term “heavy chain variable (V_{H}) domain” or “light chain variable (V_{L}) domain” respectively refer to any antibody V_{H} or V_{L} domain (e.g. a human V_{H} or V_{L} domain) as well as any derivative thereof retaining at least qualitative antigen binding ability of the corresponding native antibody (e.g. a humanized V_{H} or V_{L} domain derived from a native murine V_{H} or V_{L} domain). A V_{H} or V_{L} domain consists of a “framework” region interrupted by the three CDRs or ABRs. The framework regions serve to align the CDRs for specific binding to an epitope of an antigen. From amino-terminus to carboxyl-terminus, both V_{H} and V_{L} domains comprise the following framework (FR) and CDR regions: FR1, CDR1, FR2, CDR2, FR3, CDR3, and FR4. For camelid V_{H}H fragments, IgNARs of cartilaginous fish, V_{NAR} fragments, and derivatives thereof, there is a single heavy chain variable domain comprising the same basic arrangement: FR1, CDR1, FR2, CDR2, FR3, CDR3, and FR4.

[0101] An immunoglobulin-type binding region may be a polypeptide sequence of antibody or antigen-binding fragment thereof wherein the amino acid sequence has been varied from that of a native antibody or an Ig-like domain of a non-immunoglobulin protein, for example by molecular engineering or library screening. Because of the relevance of recombinant DNA techniques and in vitro library screening in the generation of immunoglobulin-type binding regions, antibodies can be redesigned to obtain desired characteristics, such as smaller size, cell entry, or other therapeutic improvements. The possible variations are many and may range from the changing of just one amino acid to the complete redesign of, for example, a variable region. Typically, changes in the variable region will be made in order to improve the antigen-binding characteristics, improve variable region stability, or reduce the potential for immunogenic responses.

[0102] There are numerous immunoglobulin-type binding regions that bind an extracellular part of CD20 contemplated herein. In some embodiments, the immunoglobulin-type binding region is derived from an immunoglobulin binding region, such as an antibody paratope capable of binding an extracellular part of CD20. In some embodiments, the immunoglobulin-type binding region comprises an engineered polypeptide not derived from any immunoglobulin domain but that functions like an immunoglobulin binding region by providing high-affinity binding to an extracellular part of CD20. This engineered polypeptide may optionally include polypeptide scaffolds comprising, consisting essentially of, or consisting of complementary determining regions from immunoglobulins as described herein.

[0103] There are numerous immunoglobulin-derived binding regions and non-immunoglobulin engineered polypeptides in the prior art that are useful for targeting the CD20-binding molecules as described herein to CD20-expressing cells. In some embodiments, the immunoglobulin-type binding region of the CD20-binding molecule described herein comprises, consists essentially of, or consists of one or more autonomous V_{H} domains, single-domain antibody domains (sdAbs), heavy-chain antibody domains derived from camelids (V_{H}H fragments or V_{H} domain fragments), heavy-chain antibody domains derived from camelid V_{H}H fragments or V_{H} domain fragments, heavy-chain antibody domains derived from cartilaginous fishes, immunoglobulin new antigen receptors (IgNARs), V_{NAR} fragments, single-chain variable (scFv) fragments, nanobodies, Fd fragments consisting of the heavy chain and C_{H}1 domains, permutated Fvs (pFvs), single chain Fv-C_{H}3 minibodies, dimeric C_{H}2 domain fragments (C_{H}2D), Fc antigen binding domains (Fcabs), isolated complementary determining region 3 (CDR3) fragments, constrained framework region 3, CDR3, framework region 4 (FR3-CDR3-FR4) polypeptides, small modular immunopharmaceutical (SMIP) domains, scFv-Fc fusions, multimerizing scFv fragments (diabodies, triabodies, tetrabodies), disulfide stabilized antibody variable (Fv) fragments, disulfide stabilized antigen-binding (Fab) fragments consisting of the V_{L}, V_{H}, C_{L} and C_{H}1 domains, bivalent nanobodies, bivalent minibodies, bivalent F(ab′)2 fragments (Fab dimers), bispecific tandem V_{H}H fragments, bispecific tandem scFv fragments, bispecific nanobodies, bispecific minibodies, and any genetically manipulated counterparts of the foregoing that retain its paratope and binding function (see Ward E et al., Nature 341: 544-6 (1989); Davies J, Riechmann L, Biotechnology (NY) 13: 475-9 (1995); Brinkmann U et al., J Mol Biol 268: 107-17 (1997); Reiter Y et al., Mol Biol 290: 685-98 (1999); Riechmann L, Muyldermans S, J Immunol Methods 231: 25-38 (1999); Tanha J et al., J Immunol Methods 263: 97-109 (2002); Vranken W et al., Biochemistry 41: 8570-9 (2002); Jespers L et al., J Mol Biol 337: 893-903 (2004); Jespers L et al., Nat Biotechnol 22: 1161-5 (2004); To R et al., J Biol Chem 280: 41395-403 (2005); Saerens D et al., Curr Opin Pharmacol 8: 600-8 (2008); Dimitrov D, MAbs 1: 26-8 (2009); Weiner L, Cell 148: 1081-4 (2012); Ahmad Z et al., Clin Dev Immunol 2012: 980250 (2012)).

[0104] There are a variety of binding regions comprising polypeptides derived from the constant regions of immunoglobulins, such as, e.g., engineered dimeric Fc domains, monomeric Fcs (mFcs), scFv-Fcs, V_{H}H-Fcs, C_{H}2 domains, monomeric C_{H}3s domains (mC_{H}3s), synthetically reprogrammed immunoglobulin domains, and/or hybrid fusions of immunoglobulin domains with ligands (Hofer T et al., Proc Natl Acad Sci USA 105: 12451-6 (2008); Xiao J et al., J Am Chem Soc 131: 13616-13618 (2009); Xiao X et al., Biochem Biophys Res Commun 387: 387-92 (2009); Wozniak-Knopp G et al., Protein Eng Des Sel 23 289-97 (2010); Gong R et al., PLoS ONE 7: e42288 (2012); Wozniak-Knopp G et al., PLoS ONE 7: e30083 (2012); Ying T et al., J Biol Chem 287: 19399-408 (2012); Ying T et al., J Biol Chem 288: 25154-64 (2013); Chiang M et al., J Am Chem Soc 136: 3370-3 (2014); Rader C, Trends Biotechnol 32: 186-97 (2014) Ying T et al., Biochimica Biophys Acta 1844: 1977-82 (2014)).

[0105] In some embodiments, the binding region comprises an engineered, alternative scaffold to immunoglobulin domains. Engineered alternative scaffolds are known in the art which exhibit similar functional characteristics to immunoglobulin-derived structures, such as high-affinity and specific binding of target biomolecules, and may provide improved characteristics to certain immunoglobulin domains, such as, e.g., greater stability or reduced immunogenicity. Generally, alternative scaffolds to immunoglobulins are less than 20 kilodaltons (kDa), consist of a single polypeptide chain, lack cysteine residues, and exhibit relatively high thermodynamic stability.

[0106] In some embodiments, the immunoglobulin-type binding region comprises, consists essentially of, or consists of one or more engineered, Armadillo repeat polypeptides (ArmRPs); engineered, fibronectin-derived, 10^{th} fibronectin type III (10Fn3) domains (monobodies, AdNectins™, or AdNexins™); engineered, tenascin-derived, tenascin type III domains (Centryns™); engineered, ankyrin repeat motif containing polypeptides (DARPins™); engineered, low-density-lipoprotein-receptor-derived, A domains (LDLR-A) (Avimers™); lipocalins (anticalins); engineered, protease inhibitor-derived, Kunitz domains; engineered, Protein-A-derived, Z domains (Affibodies™); engineered, gamma-B crystalline-derived scaffold or engineered, ubiquitin-derived scaffolds (Affilins); Sac7d-derived polypeptides (Nanoffitins® or affitins); engineered, Fyn-derived, SH2 domains (Fynomers®); and engineered antibody mimics and any genetically manipulated counterparts of the foregoing that retains its binding functionality (Wörn A, Plückthun A, J Mol Biol 305: 989-1010 (2001); Xu L et al., Chem Biol 9: 933-42 (2002); Wikman M et al., Protein Eng Des Sel 17: 455-62 (2004); Binz H et al., Nat Biotechnol 23: 1257-68 (2005); Hey T et al., Trends Biotechnol 23:514-522 (2005); Holliger P, Hudson P, Nat Biotechnol 23: 1126-36 (2005); Gill D, Damle N, Curr Opin Biotech 17: 653-8 (2006); Koide A, Koide S, Methods Mol Biol 352: 95-109 (2007); Byla P et al., J Biol Chem 285: 12096 (2010); Zoller F et al., Molecules 16: 2467-85 (2011); Alfarano P et al., Protein Sci 21: 1298-314 (2012); Madhurantakam C et al., Protein Sci 21: 1015-28 (2012); Varadamsetty G et al., J Mol Biol 424: 68-87 (2012)). For example, the engineered Fn3(CD20) is an engineered, alternative scaffold CD20 binding region which exhibits high-affinity binding to CD20 expressing cells (Natarajan A et al., Clin Cancer Res 19: 6820-9 (2013)).

[0107] Among certain embodiments as described herein, the immunoglobulin-type binding region is derived from a nanobody or single domain immunoglobulin-derived region V_{H}H. Generally, nanobodies are constructed from fragments of naturally occurring single, monomeric variable domain antibodies (sdAbs) of the sort found in camelids and cartilaginous fishes (Chondrichthyes). Nanobodies are engineered from these naturally occurring antibodies by truncating the single, monomeric variable domain to create smaller and more stable molecules, such as, e.g., IgNAR, V_{H}H, and V_{NAR} constructs. Due to their small size, nanobodies are able to bind to antigens that are not accessible to whole antibodies. Among certain embodiments as described herein, the immunoglobulin-type binding region is derived from a nanobody or single domain immunoglobulin-derived region V_{H}H which exhibits high-affinity binding specifically to an extracellular part of CD20.

[0108] In some embodiments, the immunoglobulin-type binding region of the CD20-binding molecules as described herein comprises an immunoglobulin-derived binding region that does not comprise an Fc region or any Fc region effector domain which retains an Fc region effector function. In some embodiments, the CD20-binding molecule does not comprise an Fc region or Fc region effector domain which retains an Fc function (see examples of Fc functions below).

[0109] As used herein, the phrase “Fc region” refers to the fragment crystallizable region or Fc (Fragment, crystallizable region) which is a polypeptide domain present in immunoglobulins, such as, e.g., the immunoglobulin isotypes IgA, IgD, IgE, IgG, and IgM. Fc regions interact with the complement system of the immune system and/or Fc receptors present on immune cells, such as, e.g., T-cells, basophils, eosinophils, macrophagocytes (macrophages), mast cells, neutrophils, and natural killer cells (NK cells). Fc region effector functions include activating T-cells, stimulating the release of inflammatory mediators such as cytokines like TNF-alpha, initiating complement dependent cytotoxicity (CDC), antibody-dependent cytotoxicity (ADCC), eventual phagocytosis, and possible immunization effects. Fc regions may be engineered into recombinant polypeptides and proteins, such as, e.g., fusions of antigen-binding fragments and Fc regions in synthetic F(ab′)2 and Fcabs.

[0110] The CD20-binding molecules as described herein that do not comprise any Fc region or Fc region effector domain which retains an Fc region effector function may function equally well in subjects with impaired Fc-FcyR-dependent mechanisms, such as immunocompromised patients, as in other subjects, such as immunocompetent patients.

[0111] Any of the above CD20 binding regions may be used as a component as described herein as long as the CD20 binding region component has a dissociation constant of 10⁻⁵ to 10⁻¹² moles per liter, preferably less than 200 nM, towards an extracellular part of CD20. In some embodiments, the CD20-binding molecule as described herein comprises a toxin effector region derived from a proteinaceous toxin, such as, e.g., a Shiga toxin A Subunit of the Shiga toxin family.

### B. Shiga Toxin Effector Polypeptide of a CD20-Binding Molecule as Described Herein

[0112] For purposes as described herein, the phrase “Shiga toxin effector region”, “Shiga toxin effector polypeptide”, or “Shiga toxin effector polypeptide region” refers to a polypeptide derived from a Shiga toxin A Subunit of at least one member of the Shiga toxin family wherein the Shiga toxin effector polypeptide is capable of exhibiting at least one Shiga toxin function. Shiga toxin functions include, e.g., promoting cell entry, deforming lipid membranes, stimulating clathrin-mediated endocytosis, directing retrograde transport, directing subcellular routing, avoiding intracellular degradation, catalytically inactivating ribosomes, effectuating cytotoxicity, and effectuating cytostatic effects.

[0113] A member of the Shiga toxin family refers to any member of a family of naturally occurring protein toxins which are structurally and functionally related, notably, toxins isolated from S. dysenteriae and E. coli (Johannes L, Römer W, Nat Rev Microbiol 8: 105-16 (2010)). For example, the Shiga toxin family encompasses true Shiga toxin (Stx) isolated from S. dysenteriae serotype 1, Shiga-like toxin 1 variants (SLT1 or Stx1 or SLT-1 or Slt-I) isolated from serotypes of enterohemorrhagic E. coli, and Shiga-like toxin 2 variants (SLT2 or Stx2 or SLT-2) isolated from serotypes of enterohemorrhagic E. coli. SLT1 differs by only one residue from Stx, and both have been referred to as Verocytotoxins or Verotoxins (VTs) (O'Brien A et al., Curr Top Microbiol Immunol 180: 65-94 (1992)). Although SLT1 and SLT2 variants are only about 53-60% similar to each other at the amino acid sequence level, they share mechanisms of enzymatic activity and cytotoxicity common to the members of the Shiga toxin family (Johannes, Nat Rev Microbiol 8: 105-16 (2010)). Over 39 different Shiga toxins have been described, such as the defined subtypes Stx1a, Stx1c, Stx1d, and Stx2a-g (Scheutz F et al., J Clin Microbiol 50: 2951-63 (2012)). Members of the Shiga toxin family are not naturally restricted to any bacterial species because Shiga-toxin-encoding genes can spread among bacterial species via horizontal gene transfer. As an example of interspecies transfer, a Shiga toxin was discovered in a strain of A. haemolyticus isolated from a patient (Grotiuz G et al., J Clin Microbiol 44: 3838-41 (2006)). Once a Shiga toxin encoding polynucleotide enters a new subspecies or species, the Shiga toxin amino acid sequence is presumed to be capable of developing slight sequence variations due to genetic drift and/or selective pressure while still maintaining a mechanism of cytotoxicity common to members of the Shiga toxin family.

[0114] Shiga toxin effector polypeptides of the CD20-binding molecules as described herein comprise, consist essentially of, or consist of a polypeptide derived from a Shiga toxin A Subunit dissociated from any form of its native Shiga toxin B Subunit. In addition, the CD20-binding molecules as described herein do not comprise any polypeptide comprising, consisting essentially of, or consisting of a functional binding domain of a native Shiga toxin B subunit. Rather, the Shiga toxin A Subunit derived regions of the CD20-binding molecules as described herein are functionally associated with heterologous binding regions to effectuate cell targeting.

[0115] In some embodiments, a Shiga toxin effector polypeptide of the CD20-binding molecules as described herein may comprise, consist essentially of, or consist of a full-length Shiga toxin A Subunit (e.g. SLT-1A (SEQ ID NO:1), StxA (SEQ ID NO:2), or SLT-2A (SEQ ID NO:3)), noting that naturally occurring Shiga toxin A Subunits may comprise precursor forms containing signal sequences of about 22 amino acids at their amino-terminals which are removed to produce mature Shiga toxin A Subunits and are recognizable to the skilled worker. In other embodiments, the Shiga toxin effector polypeptide described herein comprises, consists essentially of, or consists of a truncated Shiga toxin A Subunit which is shorter than a full-length Shiga toxin A Subunit.

[0116] Shiga-like toxin 1 A Subunit truncations are catalytically active, capable of enzymatically inactivating ribosomes in vitro, and cytotoxic when expressed within a cell. The smallest Shiga toxin A Subunit fragment exhibiting full enzymatic activity was shown to be a polypeptide composed of residues 1-239 of Slt1A. Although the smallest fragment of the Shiga toxin A Subunit reported to retain substantial catalytic activity was residues 75-247 of StxA, a StxA truncation expressed de novo within a eukaryotic cell requires only up to residue 240 to reach the cytosol and exert catalytic inactivation of ribosomes.

[0117] Shiga toxin effector polypeptides may commonly be smaller than a full-length Shiga toxin A Subunit. In some embodiments, the Shiga toxin effector polypeptide maintain the polypeptide region from amino acid position 77 to 239 (SLT-1A (SEQ ID NO:1) or StxA (SEQ ID NO:2)) or the equivalent in other A Subunits of members of the Shiga toxin family (e.g. 77 to 238 of (SEQ ID NO:3)). For example, in some embodiments described herein, a Shiga toxin effector polypeptide region derived from SLT-1A may comprise, consist essentially of, or consist of amino acids 75 to 251 of SEQ ID NO:1, 1 to 241 of SEQ ID NO:1, 1 to 251 of SEQ ID NO:1, or amino acids 1 to 261 of SEQ ID NO:1. In some embodiments, the Shiga toxin effector region derived from SLT-1A comprises a sequence with at least 90%, at least 95%, at least 96%, at least 97%, at least 98%, or at least 99% identity to amino acids 75 to 251 of SEQ ID NO:1, 1 to 241 of SEQ ID NO:1, 1 to 251 of SEQ ID NO:1, or amino acids 1 to 261 of SEQ ID NO:1.

[0118] In some embodiments, a Shiga toxin effector region may be derived from StxA. In some embodiments, a Shiga toxin effector region derived from StxA may comprise, consist essentially of, or consist of amino acids 75 to 251 of SEQ ID NO:2, 1 to 241 of SEQ ID NO:2, 1 to 251 of SEQ ID NO:2, or amino acids 1 to 261 of SEQ ID NO:2. In some embodiments, the Shiga toxin effector region derived from StxA comprises a sequence with at least 90%, at least 95%, at least 96%, at least 97%, at least 98%, or at least 99% identity to amino acids 75 to 251 of SEQ ID NO:2, 1 to 241 of SEQ ID NO:2, 1 to 251 of SEQ ID NO:2, or amino acids 1 to 261 of SEQ ID NO:2.

[0119] In some embodiments, a Shiga toxin effector region may be derived from SLT-2. In some embodiments, a Shiga toxin effector region derived from SLT-2 may comprise, consist essentially of, or consist of amino acids 75 to 251 of SEQ ID NO:3, 1 to 241 of SEQ ID NO:3, 1 to 251 of SEQ ID NO:3, or amino acids 1 to 261 of SEQ ID NO:3. In some embodiments, the Shiga toxin effector region derived from SLT-2 comprises a sequence with at least 90%, at least 95%, at least 96%, at least 97%, at least 98%, or at least 99% identity to amino acids 75 to 251 of SEQ ID NO:3, 1 to 241 of SEQ ID NO:3, 1 to 251 of SEQ ID NO:3, or amino acids 1 to 261 of SEQ ID NO:3.

[0120] In some embodiments, the binding molecules described herein comprise a Shiga toxin effector polypeptide comprising the sequence of any one of SEQ ID NOs: 1-3 and 380-391. In some embodiments, the binding molecules described herein comprise a Shiga toxin effector polypeptide comprising a sequence with one or more mutations relative to any one of SEQ ID NOs: 1-3 and 380-391. In some embodiments, the binding molecules described herein comprise a Shiga toxin effector polypeptide comprising a sequence with at least 90%, at least 95%, at least 96%, at least 97%, at least 98%, or at least 99% identity to any one of SEQ ID NOs: 1-3 and 380-391. In some embodiments, the binding molecules described herein comprise a Shiga toxin effector polypeptide with a sequence of any one of SEQ ID NOs: 1-3 and 380-391 with one or more mutations, such as 2, 3, 4, 5, 6, 7, 8, or 10 mutations. In some embodiments, the Shiga toxin effector comprises any one of SEQ ID NOs: 1-3 and 380-391 with 1-5, 5-10, 11-5, 15-20, 10-25, 25-30, or more than 30 mutations. In some embodiments, the binding molecules described herein comprise a Shiga toxin effector polypeptide comprising a sequence with one or more mutations relative to any one of SEQ ID NOs: 1-3 and 380-391, wherein the sequence comprises a S45C mutation. In some embodiments, mutations in the Shiga toxin effector polypeptide render the polypeptide catalytically inactive. In some embodiments, mutations in the Shiga toxin effector polypeptide do not affect the catalytic activity of the polypeptide. In some embodiments, mutations in the Shiga toxin effector polypeptide increase the catalytic activity of the polypeptide. In some embodiments, mutations in the Shiga toxin effector polypeptide decrease the catalytic activity of the polypeptide.

[0121] In some embodiments, the binding molecules described herein comprise a Shiga toxin effector polypeptide comprising amino acids 1 to 251 of SEQ ID NO: 1. In some embodiments, the binding molecules described herein comprise a Shiga toxin effector polypeptide that has one or more mutations relative to amino acids 1 to 251 of SEQ ID NO: 1. In some embodiments, the binding molecules described herein comprise a Shiga toxin effector polypeptide comprising a sequence with at least 90%, at least 95%, at least 96%, at least 97%, at least 98%, or at least 99% identity to amino acids 1 to 251 of SEQ ID NO: 1. In some embodiments, the binding molecules described herein comprise a Shiga toxin effector polypeptide comprising amino acids 1 to 251 of SEQ ID NO: 1 with one or more mutations, such as 2, 3, 4, 5, 6, 7, 8, or 10 mutations. In some embodiments, the Shiga toxin effector comprises amino acids 1 to 251 of SEQ ID NO: 1, with 1-5, 5-10, 11-5, 15-20, 10-25, 25-30, or more than 30 mutations. In some embodiments, mutations in the Shiga toxin effector polypeptide render the polypeptide catalytically inactive. In some embodiments, mutations in the Shiga toxin effector polypeptide do not affect the catalytic activity of the polypeptide. In some embodiments, mutations in the Shiga toxin effector polypeptide increase the catalytic activity of the polypeptide. In some embodiments, mutations in the Shiga toxin effector polypeptide decrease the catalytic activity of the polypeptide. In some embodiments, mutations in the Shiga toxin effector polypeptide reduce immunogenicity of the CD20-binding molecules disclosed herein.

[0122] In some embodiments, the binding molecules described herein comprise a Shiga toxin effector polypeptide comprising the amino acid sequence of SEQ ID NO: 382. In some embodiments, the binding molecules described herein comprise a Shiga toxin effector polypeptide that has one or more mutations relative to the amino acid sequence of SEQ ID NO: 382. In some embodiments, the binding molecules described herein comprise a Shiga toxin effector polypeptide comprising a sequence with at least 90%, at least 95%, at least 96%, at least 97%, at least 98%, or at least 99% identity to SEQ ID NO: 382. In some embodiments, the binding molecules described herein comprise a Shiga toxin effector polypeptide comprising the amino acid sequence of SEQ ID NO: 382, with one or more mutations, such as 2, 3, 4, 5, 6, 7, 8, or 10 mutations. In some embodiments, the Shiga toxin effector comprises the amino acid sequence of SEQ ID NO: 382, with 1-5, 5-10, 11-5, 15-20, 10-25, 25-30, or more than 30 mutations. In some embodiments, mutations in the Shiga toxin effector polypeptide render the polypeptide catalytically inactive. In some embodiments, mutations in the Shiga toxin effector polypeptide do not affect the catalytic activity of the polypeptide. In some embodiments, mutations in the Shiga toxin effector polypeptide increase the catalytic activity of the polypeptide. In some embodiments, mutations in the Shiga toxin effector polypeptide decrease the catalytic activity of the polypeptide. In some embodiments, mutations in the Shiga toxin effector polypeptide reduce immunogenicity of the CD20-binding molecules disclosed herein.

[0123] In some embodiments, the Shiga toxin effector polypeptide differs from a naturally occurring Shiga toxin A Subunit by up to 1, 2, 3, 4, 5, 6, 7, 8, 9, 10, 15, 20, 25, 30, 35, 40 or more amino acid residues (but by no more than that which retains at least 85%, 90%, 95%, 99%, or more amino acid sequence identity).

[0124] In some embodiments, the CD20-binding molecule comprises a toxin effector region derived from a proteinaceous toxin other than a Shiga toxin(s). In some embodiments, the CD20-binding molecule comprises a catalytically inactive Shiga toxin effector region. In some embodiments, the CD20-binding molecule does not comprise a Shiga toxin effector region. In some embodiments, the CD20-binding molecule comprises a toxin effector region, whether catalytically active or inactive, derived from a toxin(s) other than a member of the Shiga toxin family, such as, e.g., from an ABx toxin other than Shiga toxin, a ribosome inactivating protein toxin other than Shiga toxin, abrin, anthrax toxin, Aspf1, bouganin, bryodin, cholix toxin, claudin, diphtheria toxin, gelonin, heat-labile enterotoxin, mitogillin, pertussis toxin, pokeweed antiviral protein, pulchellin, Pseudomonas exotoxin A, restrictocin, ricin, saporin, sarcin, and subtilase cytotoxin (see e.g., WO 2015/113005; WO 2015/120058). In some embodiments, the CD20-binding molecule does not comprise either a toxin effector region or any polypeptide derived from a toxin.

[0125] In some embodiments, the CD20 binding regions and toxin effector polypeptide region(s) (which may be cytotoxic and/or harbor one or more mutations altering, reducing, or eliminating catalytic activity and/or cytotoxicity) may be directly linked to each other and/or suitably linked to each other via one or more linkers well known in the art and/or described herein, such as, e.g., proteinaceous linkers capable of being genetically fused between other proteinaceous components of the CD20-binding molecules.

[0126] Optionally, a CD20-binding molecule can further comprise a carboxy-terminal endoplasmic retention/retrieval signal motif, such as, e.g., the amino acids KDEL (SEQ ID NO:305) at the carboxy-terminus of a proteinaceous component (e.g. a protein component) of the CD20-binding molecule.

### C. Linkages Connecting Components of the CD20-Binding Molecules

[0127] Individual peptide, polypeptide and/or protein components of the CD20-binding molecules, e.g., CD20 binding regions and Shiga toxin effector polypeptides, may be suitably linked to each other via one or more linkers well known in the art and/or described herein. Protein and polypeptide components of the CD20-binding molecules, e.g., multi-chain binding regions, may be suitably linked to each other or other polypeptide components of the CD20-binding molecules described herein via one or more linkers well known in the art. Peptide components of the CD20-binding molecules, e.g., antigenic peptides and KDEL family endoplasmic reticulum retention/retrieval signal motifs, may be suitably linked to another component described herein via one or more linkers, such as a proteinaceous linker, which are well known in the art.

[0128] Suitable linkers are generally those which allow each polypeptide component of the CD20-binding molecule as described herein to fold with a three-dimensional structure very similar to the polypeptide components produced individually without any linker or other component. Suitable linkers include single amino acids, peptides, polypeptides, and linkers lacking any of the aforementioned, such as various non-proteinaceous carbon chains, whether branched or cyclic (see e.g. Alley S et al., Bioconjug Chem 19: 759-65 (2008); Ducry L, Stump B, Bioconjug Chem 21: 5-13 (2010)).

[0129] Suitable linkers may be proteinaceous and comprise one or more amino acids, peptides, and/or polypeptides. Proteinaceous linkers are suitable for both recombinant fusion proteins and chemically linked conjugates. A proteinaceous linker typically has from about 2 to about 50 amino acid residues, such as, e.g., from about 5 to about 30 or from about 6 to about 25 amino acid residues. The length of the linker can depend upon a variety of factors, such as, e.g., the desired property or properties for which the linker is being selected. In some embodiments, the proteinaceous linker may promote formation of higher order structures, such as dimers, e.g., homodimers and heterodimers, as well as multimeric forms. In other embodiments, the proteinaceous linker may prevent the formation of higher order structures, such as dimers (including homodimers and heterodimers) and multimers.

[0130] Suitable linkers may be non-proteinaceous, such as, e.g. chemical linkers. Various non-proteinaceous linkers known in the art may be used to link CD20 binding regions to a Shiga toxin effector polypeptide(s), such as linkers commonly used to conjugate immunoglobulin polypeptides to heterologous polypeptides. For example, components of the CD20-binding molecules as described herein may be linked together using the functional side chains of their amino acid residues and carbohydrate moieties such as, e.g., a carboxy, amine, sulfhydryl, carboxylic acid, carbonyl, hydroxyl, and/or cyclic ring group. For example, disulfide bonds and thioether bonds may be used to link two or more proteins. In addition, non-natural amino acid residues may be used with other functional side chains, such as ketone groups (see e.g. Axup J et al., Proc Natl Acad Sci USA 109: 16101-6 (2012)). Examples of non-proteinaceous chemical linkers include but are not limited to N-succinimidyl (4-iodoacetyl)-aminobenzoate, S—(N-succinimidyl) thioacetate (SATA), N-succinimidyl-oxycarbonyl-cu-methyl-α-(2-pyridyldithio) toluene (SMPT), N-succinimidyl 4-(2-pyridyldithio)-pentanoate (SPP), succinimidyl 4-(N-maleimidomethyl) cyclohexane carboxylate (SMCC or MCC), sulfosuccinimidyl (4-iodoacetyl)-aminobenzoate, 4-succinimidyl-oxycarbonyl-α-(2-pyridyldithio) toluene, sulfosuccinimidyl-6-(α-methyl-α-(pyridyldithiol)-toluamido) hexanoate, N-succinimidyl-3-(-2-pyridyldithio)-proprionate (SPDP), succinimidyl 6(3(−(-2-pyridyldithio)-proprionamido) hexanoate, sulfosuccinimidyl 6(3(−(-2-pyridyldithio)-propionamido) hexanoate, maleimidocaproyl (MC), maleimidocaproyl-valine-citrulline-p-aminobenzyloxycarbonyl (MC-vc-PAB), 3-maleimidobenzoic acid N-hydroxysuccinimide ester (MBS), alpha-alkyl derivatives, sulfoNHS-ATMBA (sulfosuccinimidyl N-[3-(acetylthio)-3-methylbutyryl-beta-alanine]), sulfodicholorphenol, 2-iminothiolane, 3-(2-pyridyldithio)-propionyl hydrazide, Ellman's reagent, dichlorotriazinic acid, and S-(2-thiopyridyl)-L-cysteine.

[0131] Suitable linkers, whether proteinaceous or non-proteinaceous, may include, e.g., protease sensitive, environmental redox potential sensitive, pH sensitive, acid cleavable, photocleavable, and/or heat sensitive linkers (see e.g., Zarling D et al., J Immunol 124: 913-20 (1980); Jung S, Moroi M, Biochem Biophys Acta 761: 152-62 (1983); Bouizar Z et al., Eur J Biochem 155: 141-7 (1986); Park L et al., J Biol Chem 261: 205-10 (1986); Browning J, Ribolini A, J Immunol 143: 1859-67 (1989); Joshi S, Burrows R, J Biol Chem 265: 14518-25 (1990); Doronina S et al., Bioconjug Chem 17: 114-24 (2003); Saito G et al., Adv Drug Deliv Rev 55: 199-215 (2003); Jeffrey S et al., J Med Chem 48: 1344-58 (2005); Sanderson R et al., Clin Cancer Res 11: 843-52 (2005); Erickson H et al., Cancer Res 66: 4426-33 (2006); Chen X et al., Adv Drug Deliv Rev 65: 1357-69 (2013)).

[0132] Proteinaceous linkers may be chosen for incorporation into the CD20-binding molecules, to form recombinant, fusion proteins. For example, the proteinaceous components of a CD20-binding protein may be joined by one or more linkers comprising one or more amino acids, peptides, and/or polypeptides. For recombinant fusion CD20-binding proteins, linkers typically comprise about 1 to 50 amino acid residues, preferably about 5 to 30 amino acid residues. Commonly, proteinaceous linkers comprise a majority of amino acid residues with polar, uncharged, and/or charged residues, such as, e.g., threonine, proline, glutamine, glycine, and alanine. Non-limiting examples of proteinaceous linkers include alanine-serine-glycine-glycine-proline-glutamate (ASGGPE) (SEQ ID NO:353), valine-methionine (VM), alanine-methionine (AM), AM(G_{2 to 4}S)ₓAM (SEQ ID NO:354) where G is glycine, S is serine, and x is an integer from 1 to 10.

[0133] Proteinaceous linkers may be selected based upon the properties desired. Proteinaceous linkers may be chosen by the skilled worker with specific features in mind, such as to optimize one or more of the fusion protein's folding, stability, expression, solubility, pharmacokinetic properties, pharmacodynamic properties, and/or the activity of the fused domains in the context of a fusion construct as compared to the activity of the same domain by itself. For example, proteinaceous linkers may be selected based on flexibility, rigidity, and/or cleavability. The skilled worker may use databases and linker design software tools when choosing linkers. Certain linkers may be chosen to optimize expression. Certain linkers may be chosen to promote intermolecular interactions between identical CD20-binding molecules to form homomultimers or different CD20-binding molecules to form heteromultimers (see e.g. FIG. 1). For example, proteinaceous linkers may be selected which allow for desired non-covalent interactions between proteinaceous components of the CD20-binding molecules as described herein, such as, e.g., interactions related to the formation of dimers and other higher order multimers (see e.g. FIG. 1).

[0134] By “linker” herein is meant a domain linker that joins two protein domains together, such as are used in scFv and/or other protein and protein fusion structures. For example, a “binding region linker” may be used to link a Shiga Toxin A subunit effector polypeptide with a binding region, and a “scFv linker” may be used to link the V_{H} and the V_{L} in an scFv. A “cleavable spacer” is a type of linker that contains a cleavage site for one or more proteases. Generally, there are a number of suitable linkers that can be used, including traditional peptide bonds, generated by recombinant techniques that allows for recombinant attachment of the two domains with sufficient length and flexibility to allow each domain to retain its biological function. In some embodiments, the linker peptide can predominantly include the following amino acid residues: Gly, Ser, Ala, or Thr. The linker peptide should have a length that is adequate to link two molecules in such a way that they assume the correct conformation relative to one another so that they retain the desired activity. In some embodiments, the linker is from about 1 to about 50 amino acids in length. In some embodiments, the linker is from about 1 to about 30 amino acids in length. In one embodiment, linkers of 1 to 20 amino acids in length can be used, with from about 5 to about 10 amino acids finding use in some embodiments. Flexible proteinaceous linkers are often greater than twelve amino acid residues long and rich in small, non-polar amino acid residues; polar amino acid residues; and/or hydrophilic amino acid residues, such as, e.g., glycines, serines, and threonines. Flexible proteinaceous linkers may be chosen to increase the spatial separation between components and/or to allow for intramolecular interactions between components. For example, various “GS” linkers are known to the skilled artisan and are composed of multiple glycines and/or one or more serines, sometimes in repeating units, such as, e.g., (GₓS)ₙ (SEQ ID NO:355), (SₓG)ₙ (SEQ ID NO:356), (GGGGS)ₙ (SEQ ID NO:357), and (G)ₙ (SEQ ID NO:358), in which x is 1 to 6 and n is 1 to 30 (see e.g. WO 96/06641). Non-limiting examples of flexible proteinaceous linkers include GKSSGSGSESKS (SEQ ID NO:359), EGKSSGSGSESKEF (SEQ ID NO:360), GSTSGSGKSSEGKG (SEQ ID NO:361), GSTSGSGKSSEGSGSTKG (SEQ ID NO:362), GSTSGSGKPGSGEGSTKG (SEQ ID NO:363), SRSSG (SEQ ID NO:364), SGSSC (SEQ ID NO:365), GSTSGSGKPGSGEGS (SEQ ID NO: 378), and EFPKPSTPPGSSGGAP (SEQ ID NO: 379). In some embodiments, the scFv linker is GSTSGSGKPGSGEGS (SEQ ID NO: 378). In some embodiments, the binding region linker is EFPKPSTPPGSSGGAP (SEQ ID NO: 379).

[0135] Rigid proteinaceous linkers are often stiff alpha-helical structures and rich in proline residues and/or one or more strategically placed prolines. Rigid linkers may be chosen to prevent intramolecular interactions between linked components.

[0136] Suitable linkers may be chosen to allow for in vivo separation of components, such as, e.g., due to cleavage and/or environment-specific instability. In vivo cleavable proteinaceous linkers are capable of unlinking by proteolytic processing and/or reducing environments often at a specific site within an organism or inside a certain cell type. In vivo cleavable proteinaceous linkers often comprise protease sensitive motifs and/or disulfide bonds formed by one or more cysteine pairs. In vivo cleavable proteinaceous linkers may be designed to be sensitive to proteases that exist only at certain locations in an organism, compartments within a cell, and/or become active only under certain physiological or pathological conditions (such as, e.g., involving proteases with abnormally high levels, proteases overexpressed at certain disease sites, and proteases specifically expressed by a pathogenic microorganism). For example, there are proteinaceous linkers known in the art which are cleaved by proteases present only intracellularly, proteases present only within specific cell types, and proteases present only under pathological conditions like cancer or inflammation, such as, e.g., R-x-x-R motif and AMGRSGGGCAGNRVGSSLSCGGLNLQAM (SEQ ID NO:366).

[0137] In some embodiments, a linker may be used which comprises one or more protease sensitive sites to provide for cleavage by a protease present within a target cell. In some embodiments, a linker may be used which is not cleavable to reduce unwanted toxicity after administration to a vertebrate organism.

[0138] Suitable linkers may include, e.g., protease sensitive, environmental redox potential sensitive, pH sensitive, acid cleavable, photocleavable, and/or heat sensitive linkers, whether proteinaceous or non-proteinaceous.

[0139] Suitable cleavable linkers may include linkers comprising cleavable groups which are known in the art such as, e.g., linkers noted by Zarling D et al., J Immunol 124: 913-20 (1980); Jung S, Moroi M, Biochem Biophys Acta 761: 152-62 (1983); Bouizar Z et al., Eur J Biochem 155: 141-7 (1986); Park L et al., J Biol Chem 261: 205-10 (1986); Browning J, Ribolini A, J Immunol 143: 1859-67 (1989); Joshi S, Burrows R, J Biol Chem 265: 14518-25 (1990).

[0140] Suitable linkers may include pH sensitive linkers. For example, certain suitable linkers may be chosen for their instability in lower pH environments to provide for dissociation inside a subcellular compartment of a target cell (see e.g. van Der Velden V et al., Blood 97: 3197-204 (2001); Ulbrich K, Subr V, Adv Drug Deliv Rev 56: 1023-50 (2004)). For example, linkers that comprise one or more trityl groups, derivatized trityl groups, bismaleimideothoxy propane groups, adipic acid dihydrazide groups, and/or acid labile transferrin groups, may provide for release of components of the CD20-binding molecules as described herein, e.g. a polypeptide component, in environments with specific pH ranges (see e.g. Welhoner H et al., J Biol Chem 266: 4309-14 (1991); Fattom A et al., Infect Immun 60: 584-9 (1992)). Certain linkers may be chosen which are cleaved in pH ranges corresponding to physiological pH differences between tissues, such as, e.g., the pH of tumor tissue is lower than in healthy tissues (see e.g. U.S. Pat. No. 5,612,474).

[0141] Photocleavable linkers are linkers that are cleaved upon exposure to electromagnetic radiation of certain wavelength ranges, such as light in the visible range. Photocleavable linkers may be used to release a component of a CD20-binding molecule as described herein, e.g. a polypeptide component, upon exposure to light of certain wavelengths. Non-limiting examples of photocleavable linkers include a nitrobenzyl group as a photocleavable protective group for cysteine, nitrobenzyloxycarbonyl chloride cross-linkers, hydroxypropylmethacrylamide copolymer, glycine copolymer, fluorescein copolymer, and methylrhodamine copolymer. Photocleavable linkers may have particular uses in linking components to form CD20-binding molecules described herein designed for treating diseases, disorders, and conditions that can be exposed to light using fiber optics.

[0142] In some embodiments, a CD20 binding region is linked to a Shiga toxin effector polypeptide using any number of means known to the skilled worker, including either or both covalent and noncovalent linkages. Individual, polypeptide subcomponents of the CD20 binding regions, e.g. an immunoglobulin CDR, ABR, heavy chain variable region (V_{H}), light chain variable region (V_{L}), and/or V_{H}H region, may be suitably linked to each other via one or more linkers well known in the art and/or described herein.

[0143] In some embodiments, the molecule comprises a CD20 binding region which is a scFv with a linker connecting a heavy chain variable (V_{H}) domain and a light chain variable (V_{L}) domain. There are numerous linkers known in the art suitable for this purpose, such as, e.g., the 15-residue (Gly4Ser)₃ peptide (SEQ ID NO:367). Suitable scFv linkers which may be used in forming non-covalent structures include GGS, GGGS (Gly3Ser or G3 S) (SEQ ID NO:368), GGGGS (Gly4Ser or G4S) (SEQ ID NO:369), GGGGSGGG (SEQ ID NO:370), GGSGGGG (SEQ ID NO:371), GSTSGGGSGGGSGGGGSS (SEQ ID NO:372), GSTSGSGKPGSSEGSTKG (SEQ ID NO:373), and GSTSGSGKPGSGEGS (SEQ ID NO: 378). In some embodiments, the scFv linker is GSTSGSGKPGSGEGS (SEQ ID NO: 378).

[0144] Suitable methods for linking components of the CD20-binding molecules may be by any method presently known in the art for accomplishing such, as long as the attachment does not substantially impede the binding capability of the CD20 binding regions, the cellular internalization of the CD20-binding molecule, and/or desired, Shiga toxin effector function(s) of the Shiga toxin effector region as measured by an appropriate assay, including by assays described herein.

### D. Structural Examples of CD20-Binding Molecules

[0145] The general structure of the CD20-binding molecules described herein is modular, in that various, diverse CD20 binding regions may be used with the same or different Shiga toxin effector polypeptide regions to provide for cell-targeting of cytotoxicity, cytostasis, diagnostic agents, and/or exogenous material delivery to various diverse CD20-expressing cell types. It will be appreciated by the skilled worker that any two or more CD20 binding regions, each capable of binding an extracellular part of CD20, may be associated with a Shiga toxin effector polypeptide(s) to produce CD20-binding molecules as described herein.

[0146] In some embodiments, the CD20-binding molecules comprise 1, 2, 3, 4, 5, 6, 7, 8, 9, 10, 11, 12, 13, 14, 15, 16, 17, 18, 19, 20, or 22 individual CD20 binding regions.

[0147] The CD20-binding molecules can comprise various structures (see e.g. FIG. 1). For example, structures can be created using covalent and/or non-covalent interactions to associate together various components to form a CD20-binding molecule. In some embodiments, the CD20-binding molecules are multimeric complexes of two or more proteinaceous subunits, such as, e.g. dimers, trimers, tetramers, diabodies, triabodies, tetrabodies, etc.

[0148] In some embodiments, a CD20-binding molecule comprises two or more CD20 binding regions because two or more components of the CD20-binding molecule are chemically linked or conjugated together. For example, chemical linkers may be used to conjugate two or more CD20-binding proteins together to form a CD20-binding molecule (see e.g. Wolff E et al., Cancer Res 53: 2560-5 (1993); Ghetie M et al., Proc Natl Acad Sci USA 94: 7509-14 (1997); Ghetie M et al., Blood 97: 1392-8 (2001)).

[0149] Certain embodiments of the CD20-binding molecules comprise a multimeric structure comprising two or more component molecules, which may be identical or non-identical. As used herein, the nomenclature (X), refers to a molecule comprising or consisting of integer number (n) copies of a component (X). For example, a dimeric protein comprising two identical, monovalent, CD20-binding polypeptide subunits may be referred to as a homodimer or (CD20-binding monomer)₂. Another example is a mixture of multivalent proteins, each protein comprising three or more identical polypeptide “X” subunits, which is referred to herein as (X)₂₊ₙ, where “n” refers to a positive integer and the value of “2+n” representing the number of CD20 binding regions per protein of the protein molecules present, thus describing a plurality of different multivalent protein species present in a single protein composition.

[0150] In some embodiments, the CD20-binding molecules are multimeric, being comprised of two or more CD20-binding molecules, such as, e.g., homodimers, homotrimers, and homotetramers, and the like. For example, two or more monovalent CD20-binding polypeptides may be combined to form a multivalent CD20-binding molecule as described herein (see e.g. FIG. 1).

[0151] In some embodiments, a CD20-binding molecule comprises two or more components, each comprising at least one CD20 binding region, because of a non-covalent intermolecular association(s) resulting from domain swapping between the two or more components which results in a CD20-binding molecule with a multimeric structure (see e.g. FIG. 1B). For example, protein domain swapping between immunoglobulin domains can be engineered and optimized as a mechanism of producing precise multimeric structures (see e.g. Arndt K et al., Biochemistry 37: 12918-26 (1998); Holliger P et al., Proc Natl Acad Sci USA 90: 6444-8 (1993).

[0152] The skilled worker can engineer multimeric CD20-binding molecules using various scFv-based polypeptide interactions, such as, e.g. scFv-based dimeric, trimeric, tetrameric complexes, etc. For example, the length of the linker in the scFv can affect the spontaneous assembly of non-covalent based, multimeric structures. Generally, linkers of twelve amino acids or less, including the absence of any linker, promote the multimerization of polypeptides or proteins comprising scFvs into higher molecular weight species via favoring intermolecular domain swapping over intra-chain domain pairing (see e.g., Huston J et al., Methods Enzymol 203: 46-88 (1991); Holliger P et al., Proc Natl Acad Sci USA 90: 6444-8 (1993); Stemmer W et al., Biotechniques 14: 256-65 (1993); Whitlow M et al., Protein Eng 6: 989-95 (1993); Desplancq D et al., Protein Eng 7: 1027-33 (1994); Whitlow M et al., Protein Eng 7: 1017-26 (1994); Alfthan K et al., Protein Eng 8: 725-31 (1995); Iiiades P et al., FEBS Lett 409: 437-41 (1997); Kortt A et al., Biomol Eng 18: 95-108 (2001); Todorovska A et al., J Immunol Methods 248: 47-66 (2001); Tomlinson I, Holliger P et al., Methods Enzymol 326: 461-79 (2001); Dolezal O et al., Protein Eng 16: 47-56 (2003)). However, scFvs with no linker at all or a linker with an illustrative length of 15 amino acid residues may multimerize (Whitlow M et al., Protein Eng 6: 989-95 (1993); Desplancq D et al., Protein Eng 7: 1027-33 (1994); Whitlow M et al., Protein Eng 7, 1017-26 (1994); Alfthan K et al., Protein Eng 8: 725-31 (1995)). The skilled worker can identify the multimeric structure(s) created and/or purified using techniques known in the art and/or described herein.

[0153] In addition, engineered structures with additional covalent bonds can be used to stabilize multimeric structures that spontaneously assemble (see e.g. Glockshuber R et al., Biochemistry 29: 1362-7 (1990)). For example, the introduction of cysteine residues at specific locations may be used to create disulfide stabilized structures like Cys-diabodies, scFv′ multimers, V_{H}H multimers, V_{NAR} multimers, and IgNAR multimers such as, e.g., by adding the following amino acid residues: GGGGC (SEQ ID NO:374) and SGGGGC (SEQ ID NO:375) (Tai M et al., Biochemistry 29: 8024-30 (1990); Caron P et al., J Exp Med 176: 1191-5 (1992); Shopes B, J Immunol 148: 2918-22 (1992); Adams G et al., Cancer Res 53: 4026-34 (1993); McCartney J et al., Protein Eng 18: 301-14 (1994); Perisic O et al., Structure 2: 1217-26 (1994); George A et al., Proc Natl Acad Sci USA 92: 8358-62 (1995); Tai M et. al.., Cancer Res (Suppl) 55: 5983-9 (1995); Olafsen et al., Protein Eng Des Sel 17: 21-7 (2004)). Thus, the skilled worker can create or stabilize CD20-binding molecules as described herein using disulfide bridge(s) and/or by adding or removing cysteine residue(s) at certain positions to control the position(s) of certain disulfide bridges.

[0154] In some embodiments, the structure of a CD20-binding molecule as described herein comprises two or more immunoglobulin domains that binding an extracellular part of CD20. In some embodiments, the CD20-binding molecule may comprise or consist of a single, continuous, polypeptide chain. For example, single-chain bivalent scFvs, sometimes referred to as tandem scFvs (taFvs), single chain diabodies (scDbs), and tandem diabodies (tanDbs or Tandabs), represent binding proteins which are created from a single continuous polypeptide (see e.g. Mack M et al., Proc Natl Acad Sci USA 92: 7021-5 (1995); Kipriyanov S et al., J Mol Biol 293: 41-56 (1999); Cochlovius, B et al., Cancer Res 60: 4336-41 (2000); Volkel T et al., Protein Eng 14: 815-23 (2001); Jendreyko N et al., J Biol Chem 278: 47812-9 (2003); Kipriyanov S et al., J Mol Biol 330: 99-111 (2003); Miller K et al., J Immunol 170: 4854-61 (2003); Meng R et al., Clin Cancer Res 10: 1274-81 (2004); Schlereth B et al., Cancer Res 65: 2882-9 (2005); Huang T, Morrison S, J Pharmacol Exp Ther 316: 983-91 (2006); Liu X et al., Int Immunopharmacol 6: 791-9 (2006); Shen J et al., J Biol Chem 281: 10706-14 (2006); Shen J et al., J Immunol Methods 318: 65-74 (2007); Wu C et al., Nat Biotech 25: 1290-7 (2007); Li B et al., Cancer Res 68: 2400-8 (2008)).

[0155] In some embodiments, a CD20-binding molecule comprises both a linker(s) between two or more CD20 binding regions as well as one or more disulfide bonds between components of the CD20 binding regions, whether proximal or distal to the linker, such as a disulfide bond between two immunoglobulin regions which requires an immunoglobulin domain swapping association between those two immunoglobulin regions (see e.g. Glockshuber R et al., Biochemistry. 29: 1362-7 (1990)).

[0156] Alternatively, two or more polypeptide chains may be linked together using polypeptide domains which self-associate or multimerize with each other (see e.g. U.S. Pat. No. 6,329,507). For example, the addition of carboxy-terminal multimerization domains has been used to construct proteins comprising immunoglobulin domains, such as, e.g., scFvs, autonomous V_{H} domains, V_{H}Hs, V_{NAR}s, and IgNARs. Examples of self-associating domains known to the skilled worker include immunoglobulin constant domains (such as knobs-into-holes, electrostatic steering, and IgG/IgA strand exchange), immunoglobulin Fab chains (e.g. (Fab-scFv)₂ and (Fab′ scFv)₂), immunoglobulin Fc domains (e.g. (scDiabody-Fc)₂, (scFv-Fc)₂ and scFv-Fc-scFv), immunoglobulin CHX domains, immunoglobulin CH1-3 regions, immunoglobulin CH3 domains (e.g. (scDiabody-CH3)₂, LD minibody, and Flex-minibody), immunoglobulin CH4 domains, CHCL domains, amphiphilic helix bundles (e.g. scFv-HLX), helix-turn-helix domains (e.g. scFv-dHlx), coiled-coil structures including leucine zippers and cartilage oligometric matrix proteins (e.g. scZIP), cAMP-dependent protein kinase (PKA) dimerization and docking domains (DDDs) combined with an A kinase anchor protein (AKAP) anchoring domain (AD) (also referred to as “dock-and-lock” or “DNL”), streptavidin, verotoxin B multimerization domains, tetramerization regions from p53, and barnase-barstar interaction domains (Pack P, Plückthun A, Biochemistry 1579-84 (1992); Holliger P et al., Proc Natl Acad Sci USA 90: 6444-8 (1993); Kipriyanov S et al., Hum Antibodies Hybridomas 6: 93-101 (1995); de Kruif J, Logtenberg T, J Biol Chem 271: 7630-4 (1996); Flu S et al., Cancer Res 56: 3055-61 (1996); Kipriyanov S et al., Protein Eng 9: 203-11 (1996); Rheinnecker M et al., J Immunol 157: 2989-97 (1996); Tershkikh A et al., Proc Natl Acad Sci USA 94: 1663-8 (1997); Müller K et al., FEBS Lett 422: 259-64 (1998); Cloutier S et al., Mol. Immunol 37: 1067-77 (2000); Li S et al., Cancer Immunol Immunother 49: 243-52 (2000); Schmiedl A et al., Protein Eng 13: 725-34 (2000); Schoonjans R et al., J Immunol 165: 7050-7 (2000); Borsi L et al., Int J Cancer 102: 75-85 (2002); Deyev S et al., Nat Biotechnol 21: 1486-92 (2003); Wong W, Scott J, Nat Rev Mol Cell Biol. 5: 959-70 (2004); Zhang J et al., J Mol Biol. 335: 49-56 (2004); Baillie G et al., FEBS Letters 579: 3264-70 (2005); Rossi E et al., Proc Natl Acad Sci USA 103: 6841-6 (2006); Simmons D et al., J Immunol Methods 315: 171-84 (2006); Braren I et al., Biotechnol Appl Biochem 47: 205-14 (2007); Chang C et al., Clin Cancer Res 13: 5586--91s (2007); Liu M et al., Biochem J 406: 237-46 (2007); Zhang J et al., Protein Expr Purif 65: 77-82 (2009); Bell A et al., Cancer Lett 289: 81-90 (2010); Iqbal U et al., Br J Pharmacol 160: 1016-28 (2010); Asano R et al., FEBS J 280: 4816-26 (2013); Gil D, Schrum A, Adv Biosci Biotechnol 4: 73-84 (2013)).

[0157] In some embodiments, the structure of a CD20-binding molecule is engineered from an antibody or Fab fragment. For example, CD20-binding molecules may be engineered using approaches known to the skilled worker (see e.g. Shuford W et al., Science 252: 724-7 (1991); Caron P et. al.., J Exp Med 176: 1191-5 (1992); Shopes B, J Immunol 148: 2918-22 (1992); Wolff E et al., Cancer Res 53: 2560-5 (1993)).

[0158] In some embodiments, all the cell-targeting binding regions of a CD20-binding molecules are identical and/or share the same binding specificities. In such embodiments, the CD20-binding molecule is monospecific—meaning it comprises CD20 binding regions that bind with high affinity to the same extracellular CD20 target biomolecule, overlapping extracellular epitopes in the same CD20 target biomolecule, and/or the same extracellular epitope in a CD20 target biomolecule. Whether two binding regions are binding to the same extracellular part of a CD20 target biomolecule may be determined by the skilled worker with available methods, such as, e.g., empirically using competitive binding assays or predictively based on the overlap of known epitope and/or immunized peptide sequences.

[0159] In some embodiments, the CD20-binding molecule may comprise binding regions that bind with high affinity to non-identical epitopes, whether non-overlapping or overlapping. The CD20-binding molecules may comprise binding regions with high binding affinity to non-overlapping epitopes. Multispecific CD20-binding molecules as described herein may be created using two or more different binding regions, such as, e.g., two different scFvs, V_{H}Hs, V_{NAR}s, and/or IgNARs in diabodies, triabodies, tandem formats (including tandem di-scFv, tandem tri-scFv, and scFv-Fc tandems), single-chain diabodies (scDb), tandem Fvs, bispecific scFv (Bis-scFv), scFv2, (Fab′)₃, tetrameric (scFv2)₂, scFv2-Fc, and combinations of scFvs, V_{H}Hs, V_{NAR}s, and/or IgNARs with different specificities (Adams G et al., Cancer Res 53: 4026-34 (1993); Mallender W et al. J Biol Chem 269: 199-206 (1994); Todorovska A et al., J Immunol Methods 248: 47-66 (2001); Korn T et al., J Gene Med 6: 642-51 (2004); Lu D et al., J Biol. Chem 280: 19665-72 (2005); Schneider M et al., Eur J Immunol 35: 987-95 (2005); Wittel U et al., Nucl Med Biol. 32: 157-64 (2005); Semenyuk E et al., Biochimie 89: 31-8 (2007)).

[0160] In some embodiments, a CD20-binding molecule may comprise a single, continuous polypeptide component which is multimerized with itself or another protein to form a multimeric structure. For example, single-chain bivalent scFvs, sometimes referred to as tandem scFvs (taFvs), single chain diabodies (scDbs), and tandem diabodies (tanDbs or Tandabs), can be expressed as single continuous polypeptide chain (Mack M et al., Proc Natl Acad Sci USA 92: 7021-5 (1995); Kipriyanov S et al., J Mol Biol 293: 41-56 (1999); Cochlovius, B et al., Cancer Res 60: 4336-41 (2000); Volkel T et al., Protein Eng 14: 815-23 (2001); Kipriyanov S et al., J Mol Biol 330: 99-111 (2003); Schlereth B et al., Cancer Res 65: 2882-9 (2005)). These structures may be engineered to multimerize into higher-order, higher-valence structures, such as, e.g. a tetravalent F(ab′)₂, (taFv)₂, and (scDb)₂ structures (see Todorovska A et al., J Immunol Methods 248: 47-66 (2001)).

[0161] Structures comprising two scFvs linked by non-covalent interactions due to the intermolecular pairing of variable regions are known to the skilled worker, such as, e.g., diabodies, mini-antibodies, and bivalent mini-antibodies, all of which may be either monospecific or bispecific (Holliger, P et al., Proc Natl Acad Sci USA 90: 6444-8 (1993); Pack P et al., Biotechnology (NY) 11: 1217-7 (1993); Tai M et al., Cancer Res (Suppl) 55: 5983-9 (1995); Atwell J et al., Mol Immunol 33: 1301-12 (1996); Rheinnecker M et al., J Immunol 157: 2989-97 (1996); Schier R et al., J Mol Biol 255: 28-43 (1996); Adams G et al., Br J Cancer 77: 1405-12 (1998); Todorovska A et al., J Immunol Methods 248: 47-66 (2001); Baler P et al., Cancer Immunol Immunother 57: 43-52 (2008)). Numerous scFv monomers have been observed to naturally form multimers or oligomers (e.g. diabodies, triabodies, and tetrabodies) due to self-association, with the majority form being dimeric for scFv structures comprising linkers of 3-12 amino acid residues (Essig N et al., J Mol Biol 234: 897-901 (1993); Griffiths A et al., EMBO J 12: 725-34 (1993); Holliger P et al., Proc Natl Acad Sci USA 90: 6444-8 (1993); Whitlow M et al., Protein Eng 6: 989-95 (1993); Desplancq D et al., Protein Eng 7: 1027-33 (1994); Whitlow M et al., Protein Eng 7, 1017-26 (1994); Kortt A et al., Protein Eng 10: 423-33 (1997); Arndt K et al., Biochemistry 37: 12918-26 (1998); Atwell J et al., Protein Eng 12: 597-604 (1999)).

[0162] In general, scFv structures with a relatively short linker of five to ten amino acid residues or less have a greater propensity for homo-dimerization (Arndt K et al., Biochemistry 37: 12918-26 (1988); Holliger P et al., Proc Natl Acad Sci USA 90: 6444-8 (1993); Perisic O et al., Structure 2: 1217-26 (1994); Atwell J et al., Mol Immunol 33: 1301-12 (1996); Iliades P et al., FEBS Lett 409: 437-41 (1997); Kortt A et al., Protein Eng 10: 423-33 (1997); Metzger D et al., Protein Eng 10: 423-33 (1997); Pei X et al., Proc Natl Acad Sci USA 94: 9637-42 (1997); Atwell J et al., Protein Eng 12: 597-604 (1999); Denton G et al., Cancer Immunol Immunother 48: 29-38 (1999); Le Gall F et al., FEBS Lett 453: 164-8 (1999); Atwell J et al., Protein Eng 12: 597-604 (1999); Dolezal, O et al., Protein Eng 13: 565-74 (2000); Nielsen U et al., Cancer Res 60: 6434-40 (2000); Todorovska A et al., J Immunol Methods 248: 47-66 (2001); Wu A et al., Protein Eng 14: 1025-33 (2001); Arndt M et al., FEBS Lett 578: 257-61 (2004); Le Gall F et al., J Immunol Methods 285: 111-27 (2004)). In contrast, scFvs with linkers comprising at least 12 amino acid residues predominantly form monomers with only a minority fraction undergoing spontaneous multimerization (Nielsen U et al., Cancer Res 60: 6434-40 (2000); Denton G et al., Cancer Immunol Immunother 48: 29-38 (1999); Kortt A et al., Biomol Eng 18: 95-108 (2001); Volkel T et al., Protein Eng 14: 815-23 (2001)).

[0163] The use of linkers of three amino acid residues or fewer may promote multimerization to higher order structures larger than dimeric forms. If an scFv has a linker of less than 3 residues, then trimerization may be favored (Iliades P et al., FEBS Lett 409: 437-41 (1997)); Kortt A et al., Biomol Eng 18: 95-108 (2001); Todorovska A et al., J Immunol Methods 248: 47-66 (2001); Arndt M et al., FEBS Lett 578: 257-61 (2004)). Furthermore, scFvs with very short linkers, e.g., linkers of 2 amino acid residues or less, often form trimers and/or mixtures of trimers and tetramers (Pei X et al., Proc Natl Acad Sci USA 94: 9637-42 (1997); Hudson P, Kortt A, J Immunol Methods 231: 177-89 (1999); Dolezal O et al., Protein Eng 13: 565-74 (2000); Power B et al., Protein Sci 12: 734-47 (2003); Le Gall F et al., J Immunol Methods 285: 111-27 (2004)). In certain arrangements with short linkers, tetramers may be favored (Dolezal O et al., Protein Eng 13: 565-74 (2003); Arndt M et al., FEBS Lett 578: 257-61 (2004)). Multimeric structures can be formed by scFvs lacking any linker, i.e. having a linker length of zero amino acid residues. For example, the direct linkage of variable domains with V_{L} before V_{H} may favor the formation of tetrabodies (Iliades P et al., FEBS Lett 409: 437-41 (1997)) whereas V_{H} before V_{L} may favor trimers (Kortt A et al., Protein Eng 10: 423-33 (1997)).

[0164] In addition to the linker length, the orientation of the variable domains may affect multimerization characteristics (Huston J et al., Proc Natl Acad Sci USA 85, 5879-83 (1988); Padlan E, Mol Immunol 31: 169-217 (1994); Kortt A et al., Protein Eng 10: 423-33 (1997); Dolezal, O et al., Protein Eng 13: 565-74 (2000); Carmichael J et al., J Mol Biol 326: 341-51 (2003); Arndt M et al., FEBS Lett 578: 257-61 (2004)). It has been suggested that the V_{L}-V_{H} orientation exhibits a greater tendency to form higher molecular weight oligomers than does the reverse orientation because the V_{L}-V_{H} orientation is more constrained (Kortt A et al., Protein Eng 10: 423-33 (1997); Dolezal, O et al., Protein Eng 13: 565-74 (2000); Plückthun A, Pack P, Immunotechnology 3: 83-105 (1997)).

[0165] The same linker has shown variability in its effect on scFv multimerization depending on the V_{H} and V_{L} orientation, such as, e.g., affecting the relative proportions of dimeric to trimeric forms (Le Gall F et al., FEBS Lett 453: 164-8 (1999); Arndt Metal., FEBS Lett 578: 257-61 (2004); Le Gall F et al., J Immunol Methods 285: 111-27 (2004)).

[0166] Camelid V_{H}H immunoglobulin domains have been multimerized using particular hinges and covalently linked multi V_{H}H chains (tandem) (Fraile S et al., Mol Microbiol 53: 1109-21 (2004); Zhang J et al., J Mol Biol 335: 49-56 (2004)). Immunoglobulin domains from Chondrichthyes, such as IgNARs, have been multimerized using certain hinges or cysteine-mediated disulfide bond stabilization (see e.g. Simmons et al., J Immunol Methods 315: 171-84 (2006)).

[0167] Thus, the generation of CD20-binding molecules comprising various immunoglobulin domains may be controlled by molecular engineering strategies which are either covalent or non-covalent, such as, e.g., covalent strategies involving single-chain tandem arrangements, covalent strategies involving cysteine-mediated, disulfide bond stabilized multimers, and/or non-covalent strategies involving dimerization domains, linker choice, and/or variable domain order. Multiple strategies (e.g., linker-related non-covalent multimerization and covalent disulfide bond stabilization) may be combined when creating structures that are CD20-binding molecules as described herein (see e.g. Lu D et al., J Immunol Methods 279: 219-32 (2003)).

[0168] For the purposes as described herein, the specific order or orientation is not fixed for the toxin effector region(s) and the two or more CD20 binding regions in relation to each other or the entire CD20-binding molecule as described herein. The components of the CD20-binding molecules as described herein may be arranged in any order provided that the desired activities of the CD20 binding regions and the toxin effector region(s) are not eliminated. Desired activities include providing the CD20-binding molecule with the ability to, e.g., bind CD20-expressing cells; rapidly induce cellular internalization; cause efficient internalization; intracellularly route to a desired subcellular compartment(s); cause cytostasis; cause cytotoxicity; selectively kill CD20-expressing cells; deliver exogenous materials into the interior of a cell; diagnosis a disease, disorder, or condition; and/or treat a disease, disorder, or condition in a patient in need thereof.

[0169] In some embodiments, the CD20-binding molecule described herein comprises (i) an anti-CD20 scFv; (ii) a binding region linker; and (iii) a Shiga toxin effector polypeptide. In some embodiments, the CD20-binding molecule comprises an amino acid sequence with at least 90%, at least 95%, at least 96%, at least 97%, at least 98%, or at least 99% identity to SEQ ID NO: 54. In some embodiments, the CD20-binding molecule comprises an amino acid sequence of SEQ ID NO: 54. In some embodiments, the CD20-binding molecule comprises an amino acid sequence of SEQ ID NO: 54 with one or more mutations, such as 2, 3, 4, 5, 6, 7, 8, or 10 mutations. In some embodiments, the CD20-binding molecule comprises an amino acid sequence of SEQ ID NO: 54 with 1-5, 5-10, 11-5, 15-20, 10-25, 25-30, or more than 30 mutations.

### E. Determining the Relative Proportion(s) of a CD20-Binding Molecule to One or More Other CD20-Binding Molecule(s) Present in a Composition as Described Herein

[0170] The ratios, percentages, and/or relative proportions of different molecular species within a composition as described herein may be determined by the skilled worker using a technique well-known in the art and/or described herein, such as, e.g., chromatographic, electrophoretic, electrochromatographic, capillary, centrifugation, isoelectric focusing, and microfluidic techniques for analyzing proteinaceous molecules. For example, the size and/or intensity of different “peaks” or “bands” resulting from subjecting a protein sample to any of the aforementioned methods can be used to calculate the relative ratio of different-sized CD20-binding molecules within a composition.

[0171] Because all compositions as described herein comprise at least one CD20-binding molecule which comprises at least one proteinaceous component, the skilled worker may use techniques known in the art to determine relative proportions of proteinaceous molecules. For example, the proportions of different proteinaceous molecular species within a composition as described herein may be determined by amino acid analysis/amino acid quantification techniques known to the skilled worker (see e.g. Bio-Synthesis, Inc., Lewisville, Tex., U.S.). In another example, the relative proportions of different-sized proteinaceous molecules within a composition as described herein may be determined using chromatographic, electrophoretic, electrochromatographic, and/or density-gradient ultra-centrifugation techniques known to the skilled worker and/or described herein, such as, e.g., via gel electrophoresis and densitometry analysis of the results.

[0172] The skilled worker may use software methods known in the art and/or described herein to perform analysis of data obtained from, inter alia, amino acid quantification, chromatographic, electrophoretic, electrochromatographic, and density-gradient ultra-centrifugation assays to determine the proportions of different molecular species present in a composition as described herein. For example, the skilled worker may use software methods known in the art to perform peak-integration analysis of chromatographic, electrophoretic, and/or electrochromatographic data, such as, e.g., size-exclusion chromatographic (SEC) data, in order to compare the relative proportion(s) of different molecular species present in a composition as described herein. Through the use of molecular-size migration standards (e.g., gel filtration and ion-exchange standards) and knowledge of possible molecular species present in a composition as described herein, the size of molecular species in a peak may be estimated and the identity of the molecular species in a peak may be inferred. Alternatively or in addition, complimentary methods (e.g. sodium dodecyl sulfate, polyacrylamide gel electrophoresis (SDS-PAGE) or mass spectroscopy) known to the skilled worker and/or described herein may be used to determine the molecule(s) composed in certain peaks.

[0173] Peak integration calculations can be used to determine various curve characteristics including peak areas, retention times, peak heights, peak widths, and percentage of peak area to total peak areas. For any peak integration analysis, a baseline may be calculated first, such as, e.g., using an automatic calculation combined with a blank curve (e.g. data collected from a solvent or mobile phase blank run), blank curve subtraction, or zero baseline. Certain settings, such as, e.g., structure width, baseline noise parameter(s), baseline slope limit or threshold slope setting, maximum baseline limit, and/or minimum distance between data points, may be adjusted in certain situations. For any chromatographic, electrophoretic, and/or electrochromatographic data analysis, the scope of analysis can be limited to certain retention time ranges (e.g., to avoid the column inclusion volume and/or to avoid data from retention times beyond the exclusion limit). User editing of peak window limits and rejection of peak assignments may be performed where appropriate or via changing settings like minimum area and/or minimum height.

[0174] Amino acid quantification, chromatographic, electrophoretic, electrochromatographic, and/or density-gradient ultra-centrifugation methods known to the skilled worker and/or described herein may be used to determine: 1) relative concentration ratios of different CD20-binding molecules within a composition as described herein, 2) relative molar ratios of different CD20-binding molecules within a composition as described herein, 3) relative mass ratios of different CD20-binding molecules within a composition as described herein, and/or 4) relative molal concentration ratios of different CD20-binding molecules within a composition as described herein. For example, the relative proportion of CD20-binding molecule in a composition as described herein can be expressed as a percentage (whether of concentrations, molarities, masses, or molalities) calculated from the total CD20-binding molecule divided by the total proteinaceous species multiplied by 100. Alternatively, the relative proportion of CD20-binding molecule in a composition as described herein can be expressed as a ratio of concentrations, molarities, masses, or molalities using the measurement of a total CD20-binding molecule species to the measurement of another molecular species regardless of it being a different CD20-binding molecule species or a non-CD20-binding molecular species.

[0175] In the Examples below, fast protein liquid chromatography size exclusion (FPLC-SEC) and high performance liquid chromatography size exclusion (HPLC-SEC) analyses of CD20-binding molecule compositions were used to determine the relative amounts of CD20-binding molecules of different sizes present in a composition as well as the relative amounts of multivalent CD20-binding molecules to other molecules like monovalent CD20-binding molecules, e.g., ratios between monovalent, divalent, and higher-valence CD20-binding proteinaceous species present in the compositions were determined.

[0176] One example of a method known in the art with which the skilled worker may use to determine ratios and/or percentages of different molecular species within a composition as described herein is dynamic light scattering or photon correlation spectroscopy (see e.g., Lamkemeyer T et al., FEBS J 273: 3393-410 (2006); Rousselot Metal., FEBS J 273: 4055-71 (2006); Bruneaux M et al., Curr Protein Pept Sci 9: 15-80 (2008)).

[0177] Another example of a method known in the art with which the skilled worker may use to determine ratios and/or percentages of different molecular species within a composition as described herein is the Protein 230 Assay using the Agilent Bioanalyzer running Agilent 2100 Expert software (Agilent Technologies, Inc., Santa Clara, Calif., U.S.). The Protein 230 Assay can be used to estimate the quantity, molecular weight, and purity of a CD20-binding molecule composition as described herein. The Protein 230 Assay produces data presented as gel-like images with “bands” and/or electrophenograms with “peaks.” A standard ladder of known marker sizes may be used to create standard gel-like and electrophenogram profiles for each analysis. Then the migration behavior of a sample in the assay is used to predict, inter alia, its size. Laser-induced fluorescence intensity may be used to estimate protein quantity in a sample, individual band, and/or peak.

[0178] In some embodiments, the multivalent CD20-binding molecule compositions as described herein comprise a multivalent CD20-binding molecule as described herein, wherein the composition comprises a ratio of monovalent CD20-binding protein concentration to total CD20-binding molecule concentration of less than one to three; and wherein each monovalent CD20-binding protein comprises only one CD20 binding region capable of specifically binding an extracellular part of a CD20 and comprises at least one Shiga toxin effector polypeptide. In some embodiments, the multivalent CD20-binding molecule composition comprises the ratio of monovalent CD20-binding protein concentration to total CD20-binding molecule concentration of less than the ratio selected from the following: 1:5, 1:6, 1:7, 1:8, 1:9, 1:10, and 1:11. In some embodiments, the multivalent CD20-binding molecule composition as described herein comprises a ratio of multivalent CD20-binding protein concentration to total CD20-binding protein concentration of more than two to three.

[0179] In some embodiments, the CD20-binding molecule compositions as described herein comprise a ratio of relatively large valence CD20-binding protein concentration to total CD20-binding protein concentration of less than the ratio selected from the following: 1:4, 1:7, 1:11, 1:21, 1:41, 1:71, 1:111, and 1:161; wherein each relatively large-valence CD20-binding protein comprises three or more CD20 binding regions capable of specifically binding an extracellular part of a CD20 and comprises at least one Shiga toxin effector polypeptide.

[0180] In some embodiments, the CD20-binding molecule compositions as described herein comprise a ratio of bivalent CD20-binding molecule concentration to total CD20-binding molecule concentration of more than a ratio selected from the following: 1:2, 2:3, 3:4, 4:5, 5:6, 7:8, 8:9, 9:10, 10:11, 11:12, 12:13, 13:14, and 14:15; wherein each bivalent CD20-binding molecule comprises (1) only two CD20 binding regions capable of specifically binding an extracellular part of a CD20 and (2) one or more Shiga toxin effector polypeptides.

[0181] In some embodiments, the CD20-binding molecule compositions comprise a multivalent CD20-binding molecule, wherein the composition comprises a ratio of monovalent CD20-binding molecule mass to total CD20-binding molecule mass of less than one to three; and wherein each monovalent CD20-binding molecule comprises only one CD20 binding region capable of specifically binding an extracellular part of a CD20 and comprises at least one Shiga toxin effector polypeptide. In some embodiments, the CD20-binding molecule composition comprises the ratio of monovalent CD20-binding molecule mass to total CD20-binding protein mass of less than the ratio selected from the following: 1:5, 1:6, 1:7, 1:8, 1:9, 1:10, and 1:11. In some embodiments, the CD20-binding molecule composition as described herein comprises a ratio of multivalent CD20-binding molecule mass to total CD20-binding molecule mass of more than two to three.

[0182] In some embodiments, the CD20-binding molecule composition comprises a ratio of relatively large valence CD20-binding molecule mass to total CD20-binding molecule mass of less than the ratio selected from the following: 1:4, 1:7, 1:11, 1:21, 1:41, 1:71, 1:111, and 1:161; wherein each relatively large-valence CD20-binding molecule comprises three or more CD20 binding regions capable of specifically binding an extracellular part of a CD20 and comprises at least one Shiga toxin effector polypeptide.

[0183] In some embodiments, the CD20-binding molecule composition comprises a ratio of bivalent CD20-binding molecule mass to total CD20-binding molecule mass of more than a ratio selected from the following: 1:2, 2:3, 3:4, 4:5, 5:6, 7:8, 8:9, 9:10, 10:11, 11:12, 12:13, 13:14, and 14:15; wherein each bivalent CD20-binding molecule comprises (1) only two CD20 binding regions capable of specifically binding an extracellular part of a CD20 and (2) one or more Shiga toxin effector polypeptides.

[0184] In some embodiments, the CD20-binding molecule composition as described herein comprises a multivalent CD20-binding molecule as described herein, wherein the composition comprises a ratio of monovalent CD20-binding molecule molarity to total CD20-binding molecule molarity of less than one to 1.5; and wherein each monovalent CD20-binding molecule comprises only one CD20 binding region capable of specifically binding an extracellular part of a CD20 and comprises at least one Shiga toxin effector polypeptide. In some embodiments, the CD20-binding molecule composition comprises the ratio of monovalent CD20-binding molecule molarity to total CD20-binding protein molarity of less than the ratio selected from the following: 1:2, 1:3, 1:4, 1:5, 1:6, 1:7, and 1:8. In some embodiments, the CD20-binding molecule composition as described herein comprises a ratio of multivalent CD20-binding molecule molarity to total CD20-binding molecule molarity of more than one to 1.5.

[0185] In some embodiments, the CD20-binding molecule composition as described herein comprises a ratio of relatively large valence CD20-binding molecule molarity to total CD20-binding molecule molarity of less than the ratio selected from the following: 1:2, 1:3.5, 1:5, 1:11, 1:21, 1:36, 1:55, and 1:59; wherein each relatively large-valence CD20-binding molecule comprises three or more CD20 binding regions capable of specifically binding an extracellular part of a CD20 and comprises at least one Shiga toxin effector polypeptide.

[0186] In some embodiments, the CD20-binding molecule composition as described herein comprises a ratio of bivalent CD20-binding molecule molarity to total CD20-binding molecule molarity of more than a ratio selected from the following: 1:1.5, 2:3, 3:4, 4:5, 5:6, 7:8, 8:9, 9:10, 10:11, 11:12, 12:13, 13:14, and 14:15; wherein each bivalent CD20-binding molecule comprises (1) only two CD20 binding regions capable of specifically binding an extracellular part of a CD20 and (2) one or more Shiga toxin effector polypeptides.

[0187] In some embodiments, the CD20-binding molecule composition as described herein comprises a multivalent CD20-binding molecule as described herein, wherein the composition comprises a ratio of monovalent CD20-binding molecule molality to total CD20-binding molecule molality of less than one to 1.5; and wherein each monovalent CD20-binding molecule comprises only one CD20 binding region capable of specifically binding an extracellular part of a CD20 and comprises at least one Shiga toxin effector polypeptide. In some embodiments, the CD20-binding molecule composition comprises the ratio of monovalent CD20-binding molecule molality to total CD20-binding protein molality of less than the ratio selected from the following: 1:2, 1:3, 1:4, 1:5, 1:6, 1:7, and 1:8. In some embodiments, the CD20-binding molecule composition as described herein comprises a ratio of multivalent CD20-binding molecule molality to total CD20-binding molecule molality of more than one to 1.5.

[0188] In some embodiments, the CD20-binding molecule composition as described herein comprises a ratio of relatively large valence CD20-binding molecule molality to total CD20-binding molecule molality of less than the ratio selected from the following: 1:2, 1:3.5, 1:5, 1:11, 1:21, 1:36, 1:55, and 1:59; wherein each relatively large-valence CD20-binding molecule comprises three or more CD20 binding regions capable of specifically binding an extracellular part of a CD20 and comprises at least one Shiga toxin effector polypeptide.

[0189] In some embodiments, the CD20-binding molecule composition as described herein comprises a ratio of bivalent CD20-binding molecule molality to total CD20-binding molecule molality of more than a ratio selected from the following: 1:1.5, 2:3, 3:4, 4:5, 5:6, 7:8, 8:9, 9:10, 10:11, 11:12, 12:13, 13:14, and 14:15; wherein each bivalent CD20-binding molecule comprises (1) only two CD20 binding regions capable of specifically binding an extracellular part of a CD20 and (2) one or more Shiga toxin effector polypeptides.

### F. Molecular Stability, Composition Stability, Controlling Multimerization, and Minimizing Aggregation

[0190] For certain applications, the stability of the relative proportion of multivalent CD20-binding molecule(s) to total CD20-binding molecules in a composition as described herein may be important to the composition's effectiveness. For example, in certain medical applications, the stability of the relative proportions of multivalent CD20-binding molecule(s) as described herein to monovalent CD20-binding molecule(s) may be important. In certain applications, the stability of the relative proportions of bivalent CD20-binding molecules to higher-valence CD20-binding molecules may be important. In certain applications the stability of the relative proportion of bivalent CD20-binding molecules to non-bivalent CD20-binding molecules may be important.

[0191] For certain embodiments, a one or more steps of controlled multimerization of some or all of the components of a CD20-binding molecule as described herein may be used to produce a composition as described herein.

[0192] For some applications, the minimization or otherwise controlling of unwanted aggregation and/or multimerization of CD20-binding molecules may be important for certain compositions as described herein. For example, with certain proteinaceous therapeutics, the aggregation and/or multimerization of the therapeutic molecule can in certain situations increase the risk for unwanted immune responses in recipients of the proteinaceous therapeutic. In particular, aggregation and/or multimerization of CD20-binding molecules to higher molecular weight complexes may increase the risk of unwanted immune responses after administration of certain CD20-binding molecule compositions to certain recipients. In addition, misfolded proteins and degraded protein products can exhibit increased immunogenicity as compared to their properly folded counterparts.

[0193] For all of these reasons and depending on the specific application, the skilled worker will appreciate whether there is a need to consider 1) the stability of CD20-binding molecules of the compositions as described herein and 2) the stability of the ratios of different CD20-binding molecules present in compositions as described herein. For example, in some embodiments, the CD20-binding molecule as described herein and compositions thereof are the result of controlled multimerization and/or certain purification steps. Similarly, in some embodiments, the CD20-binding molecule as described herein will be engineered to eliminate or reduce certain multimerization possibilities. In some embodiments, the CD20-binding molecule as described herein will be designed to avoid the formation of unwanted aggregates, such as, e.g., under certain storage conditions like in an aqueous solution at 8, 4, 2, −4, −10, −20, or −25° C.

[0194] For certain applications of the compositions as described herein, it may be desirable to minimize in the composition as described herein the amount of: 1) high molecular weight CD20-binding molecules (e.g. molecules greater than 175, 180, 190, 200, or 250 kDa or larger); 2) greatly CD20-binding molecules (i.e. molecules comprising five or more CD20 binding regions); 3) multimers of CD20-binding molecules which are high molecular weight CD20-binding molecules representing #1 and/or greatly CD20-binding molecules representing #2 (e.g. certain, large, noncovalent multimers of CD20-binding molecules); 3) misfolded proteins (e.g., misfolded CD20-binding proteins or protein components thereof); and/or 4) degradation products (e.g. unwanted protein fragments of a proteinaceous component of a CD20-binding molecule, such as, e.g., a polypeptide fragment of a Shiga toxin effector region or CD20 binding region). For example, a rationale to minimize the amount of any of the types of molecules listed in #1 to #4 above might be for medical applications where the presence of a certain amounts of these molecules might increase the potential for unwanted antigenic and/or immunogenic reactions in a recipient of a compositions as described herein, such as, e.g., by the presence of these molecules revealing new epitopes or by forming repetitive motifs more readily identified by a recipient's immune system as foreign.

[0195] The skilled worker may use routine methods to assess multimerization states of the CD20-binding molecules as described herein and/or molecules present in the compositions as described herein. The skilled worker may use routine methods to minimize the presence or relative proportion of CD20-binding molecule aggregates, high molecular weight CD20-binding protein multimers, misfolded CD20-binding proteins, and CD20-binding protein degradation products in the compositions as described herein.

[0196] In some embodiments of the compositions as described herein, the relative proportion of bivalent, trivalent, and/or tetravalent forms of multivalent CD20-binding molecule(s) is maximized, such as by further purifying away from monovalent CD20-binding protein(s), higher molecular weight CD20-binding molecule(s), misfolded CD20-binding protein(s), and/or protein degradation product(s).

[0197] The skilled worker may use routine methods to create a CD20-binding molecule as described herein, and compositions thereof. The skilled worker may use routine methods to stabilize the relative proportions of certain CD20-binding molecules to other molecules in a composition as described herein, including the proportions of different multimeric forms of CD20-binding molecules, such as, e.g., the proportions of covalently linked, multimeric CD20-binding molecules to non-covalently linked, multimeric CD20-binding molecules (see e.g. Gil D, Schrum A, Adv Biosci Biotechnol 4: 73-84 (2013); WO2005000898). For example, the multimerization of CD20-binding molecule(s) in compositions as described herein may be controlled and/or minimized, such as, e.g., by choosing certain linkers to link and/or associate different components and/or subunits of the CD20-binding molecule(s) present in the compositions as described herein. For example, in some embodiments, the CD20 binding region of the CD20-binding molecule as described herein is engineered to minimize the formation of unwanted, intermolecular associations, multimers, and/or aggregates, such as, e.g., by using disulfide-stabilized scFvs, Fv fragments, or Fabs (see e.g. Reiter Y et al., J Biol Chem 269: 18327-31 (1994); Kuan C, Pastan I, Biochemistry 35: 2872-7 (1996); Almog O et al., Proteins 31: 128-38 (1998); Schoonjans R et al., J Immunol 165: 7050-7 (2000); Olafsen T et al., Protein Eng Des Sel 17: 21-7 (2004); Gil D, Schrum A, Adv Biosci Biotechnol 4: 73-84 (2013); U.S. 20120283418); base loop connections (see e.g. Brinkmann U et al., J Mol Biol 268: 107-17 (1997)); and/or other modifications, such as the addition of charged resides, glycans, and/or immunoglobulin-domain truncations (see e.g. Gong R et al., Mol Pharm 10: 2642-52 (2013); Lee C et al., Trends Biotechnol 31: 612-20 (2013)).

[0198] In some embodiments as described herein, the CD20-binding molecule as described herein comprises a CD20 binding region which is an scFv engineered not to aggregate, such as, e.g., by using a shorter linker (typically less than twelve amino acid residues) and/or disulfide-stabilized linker that links the heavy and light chain regions of the scFv (see e.g., Brinkmann U et al., Proc Natl Acad Sci USA 90: 7538-42 (1993); Whitlow M et al., Protein Engineering 6: 989-95 (1993); Reiter Y et al., Biochemistry 33: 5451-9 (1994); Gong R et al., Molecular Pharmaceutics 10: 2642-52 (2013)).

[0199] In some embodiments, the CD20-binding molecule composition as described herein minimizes the proportion relative to other CD20-binding molecules of certain CD20-binding molecule(s) with a valence greater than two. In some embodiments, the CD20-binding molecule composition as described herein comprises a relative percentage of CD20-binding molecules with a valence of greater than four which is 15%, 10%, 7.5%, 5%, 2%, 1%, or less of the total CD20-binding molecules in the composition. In some embodiments, a CD20-binding molecule composition as described herein comprises a relative percentage of CD20-binding molecules with a valence of greater than three to other CD20-binding molecules which is 15%, 10%, 7.5%, 5%, 2%, 1%, or less of the total CD20-binding molecules in the composition. In some embodiments, a CD20-binding molecule composition as described herein comprises a percentage of CD20-binding molecules with a valence greater than two which is 15%, 10%, 7.5%, 5%, 2%, 1%, or less of the total CD20-binding molecules in the composition.

[0200] In some embodiments, the composition as described herein maximizes the relative proportion of CD20-binding molecule(s) with exactly two CD20 binding regions to total CD20-binding molecules. Thus, in some embodiments, a composition as described herein comprises a proportion of CD20-binding molecule with only two CD20 binding regions which is 80%, 85%, 88%, 90%, 92%, 93%, or more of the total CD20-binding molecules in the composition.

[0201] For certain applications, it may be desirable to maintain stability (e.g., the stability of associations and/or linkages between components and/or subunits of the CD20-binding molecules) of CD20-binding molecule(s) in a composition as described herein, such as, e.g., to minimize degradation during formulation, storage (such as, e.g., storage in an aqueous solution at 8, 4, 2, −4, −10, −20, or −25° C.), and/or after administration to a recipient. The skilled worker may use well known methods to minimize component or subunit separation for a CD20-binding molecule as described herein, such as, e.g., by using high-stability linkages between the Shiga toxin effector polypeptide(s) and binding region(s) and/or by engineering disulfide linkages between components, regions, or sub-regions of a CD20-binding molecule or between monovalent CD20-binding proteins to generate multivalent CD20-binding protein(s) as described herein (see e.g. Gil D, Schrum A, Adv Biosci Biotechnol 4: 73-84 (2013)). The skilled worker may use the addition or maintenance of intermolecular disulfide bonds to stabilize certain CD20 binding regions of the CD20-binding molecules as described herein.

[0202] In some embodiments, the CD20-binding molecule comprises a CD20 binding region(s) which comprises an immunoglobulin domain and/or Ig-fold structure having an intra-domain disulfide bond, such as, e.g., the disulfide bond found natively between the B and F β strands of certain immunoglobulins and/or a disulfide bond between their heavy and light chains of or derived from an immunoglobulin. However, in some embodiments of the CD20-binding molecules as described herein, the molecules are very stable even though they do not comprise an intra-domain disulfide bond or any intra-domain disulfide bond within one or more CD20 binding regions.

[0203] In some embodiments, the composition as described herein comprises a CD20-binding molecule with one or more disulfide bonds between two or more cysteine residues contained within Shiga toxin effector polypeptide regions of different polypeptide chains. In some embodiments, the composition as described herein comprises a proteinaceous, dimeric CD20-binding molecule with five disulfide bonds, such as, e.g., the dimeric CD20-binding molecule comprising: 1) four, intramolecular, disulfide bonds representing two disulfide bonds per immunoglobulin-derived CD20 binding region and where each disulfide bond involves a pair of cysteine residues and wherein one cysteine residue of each pair is within an immunoglobulin heavy chain derived domain and the other cysteine residue of the pair is within an immunoglobulin light chain derived domain; and 2) one, intermolecular, disulfide bond bridging two, Shiga toxin effector regions wherein the disulfide bond occurs between a pair of cysteine residues where each cysteine residue of the pair is within a Shiga toxin effector region but the Shiga toxin effector regions are within different polypeptide chains representing different subunits of a CD20-binding protein as described herein.

[0204] In some embodiments, the CD20-binding molecule as described herein comprises a CD20 binding region derived from an immunoglobulin which has been engineered with certain camelid V_{H}H “tetrad” mutations to improve solubility, to improve stability, and/or otherwise “camelize” the binding region.

### II. Examples of Specific Structural Variations of the CD20-Binding Molecules

[0205] In some embodiments, the CD20-binding molecules described herein comprises 1) two or more proteinaceous CD20 binding regions, each capable, on its own, of specifically binding an extracellular part of CD20; and 2) one or more Shiga toxin effector regions comprising a polypeptide derived from the amino acid sequence of the A Subunit of at least one member of the Shiga toxin family.

[0206] In some embodiments, the CD20-binding molecule as described herein comprises two or more CD20 binding regions comprising an immunoglobulin-type polypeptide selected for specific and high-affinity binding to the cellular surface of a CD20+ cell.

[0207] In some embodiments of the CD20-binding molecule as described herein, the CD20 binding region comprises a polypeptide(s), the polypeptide(s) comprising: a) a heavy chain variable (V_{H}) domain comprising i) a HCDR1 comprising, consisting essentially of, or consisting of the amino acid sequence as shown in SEQ ID NO:5, SEQ ID NO:11, SEQ ID NO:17, SEQ ID NO:23, SEQ ID NO:29, or SEQ ID NO:35; ii) a HCDR2 comprising, consisting essentially of, or consisting of the amino acid sequence as shown in SEQ ID NO:6, SEQ ID NO:12, SEQ ID NO:18, SEQ ID NO:24, SEQ ID NO:30, or SEQ ID NO:36; and iii) a HCDR3 comprising, consisting essentially of, or consisting of the amino acid sequence as shown in SEQ ID NO:7, SEQ ID NO:13, SEQ ID NO:19, SEQ ID NO:25, SEQ ID NO:31, or SEQ ID NO:37; or b) a light chain variable (V_{L}) domain comprising i) a LCDR1 comprising, consisting essentially of, or consisting of the amino acid sequence as shown in SEQ ID NO:8, SEQ ID NO:14, SEQ ID NO:20, SEQ ID NO:26, SEQ ID NO:32, or SEQ ID NO:38; ii) a LCDR2 comprising, consisting essentially of, or consisting of the amino acid sequence as shown in SEQ ID NO:9, SEQ ID NO:15, SEQ ID NO:21, SEQ ID NO:27, SEQ ID NO:33, or SEQ ID NO:39; and iii) a LCDR3 comprising, consisting essentially of, or consisting of the amino acid sequence as shown in SEQ ID NO:10, SEQ ID NO:16, SEQ ID NO:22, SEQ ID NO:28, SEQ ID NO:34, or SEQ ID NO:40. In some embodiments, the CD20-binding molecule as described herein comprises the CD20 binding region comprising, consisting essentially of, or consisting of amino acids 1-232, 1-233, 1-234, 1-235, 1-236, 1-242, 1-243, 1-244, 1-245, 1-246, 1-252, 1-253, 1-254, 1-255, or 1-256 of any one of SEQ ID NOs: 47-119 and 176-248.

[0208] In some embodiments, the CD20-binding molecule as described herein comprises one or more Shiga toxin effector polypeptides(s), each comprising, consisting essentially of, or consisting of the polypeptide: (a) amino acids 75 to 251 of SEQ ID NO:1, SEQ ID NO:2, or SEQ ID NO:3; (b) amino acids 1 to 241 SEQ ID NO:1, SEQ ID NO:2, or SEQ ID NO:3; (c) amino acids 1 to 251 of SEQ ID NO:1, SEQ ID NO:2, or SEQ ID NO:3; or (d) amino acids 1 to 261 of SEQ ID NO:1, SEQ ID NO:2, or SEQ ID NO:3.

[0209] In some embodiments, the CD20-binding molecules comprise the Shiga toxin effector region comprising or consisting essentially of amino acids 75 to 251 of SEQ ID NO:1, SEQ ID NO:2, or SEQ ID NO:3. Some embodiments are CD20-binding molecules in which the Shiga toxin effector region comprises or consists essentially of amino acids 1 to 241 of SEQ ID NO:1, SEQ ID NO:2, or SEQ ID NO:3; amino acids 1 to 251 of SEQ ID NO:1, SEQ ID NO:2, or SEQ ID NO:3; and/or amino acids 1 to 261 of SEQ ID NO:1, SEQ ID NO:2, or SEQ ID NO:3.

[0210] In some embodiments, the CD20-binding molecule comprises or consists essentially of amino acids of SEQ ID NO:4, SEQ ID 12, SEQ ID NO:14, or SEQ ID NO:16.

[0211] In some embodiments, the CD20-binding molecule as described herein comprises one or more Shiga toxin effector polypeptides comprising one or more of the following substitutions: A231E, R75A, Y77S, Y114S, E167D, R170A, R176K, and W203A as positioned in the polypeptide shown in SEQ ID NO:1, SEQ ID NO:2, SEQ ID NO:3, and SEQ ID NO:4.

[0212] In some embodiments, the CD20-binding molecule as described herein comprises or consists essentially of two proteins and comprises at least one disulfide bond. In some embodiments, the disulfide bond is between a pair of cysteine residues wherein a first cysteine residue of the pair is positioned at amino acid residue 242 or 261 of the polypeptide shown in SEQ ID NO:1 or SEQ ID NO:2 or at amino acid residue position 241 or 260 in the polypeptide shown in SEQ ID NO:3 in a first Shiga toxin effector polypeptide region and a second cysteine residue of the pair is positioned at amino acid residue 242 or 261 of the polypeptide shown in SEQ ID NO:1 or SEQ ID NO:2 or at amino acid residue position 241 or 260 in the polypeptide shown in SEQ ID NO:3 of second Shiga toxin effector polypeptide region (see e.g. FIG. 1).

[0213] In some embodiments, the CD20-binding molecule as described herein comprises the protein shown in any one of SEQ ID NOs: 47-304, and optionally, the protein further comprises an amino-terminal methionine residue. In some embodiments, the CD20-binding molecule as described herein comprises, consists of, or consists essentially of two proteins, each protein selected from any one of the polypeptides shown in SEQ ID NOs: 47-304, and optionally, each protein may further comprises an amino-terminal methionine residue. In some embodiments, each of the two proteins has the sequence of any one of SEQ ID NOs: 47-175, and the CD20-binding molecule further comprises five disulfide bonds, each linking the sulfhydryl groups of a pair of cysteine residues; and wherein four of the five disulfide bonds involve cysteine residues which are in an immunoglobulin domain of a CD20-binding region of the protein linked to another cysteine residue in an immunoglobulin domain of the same CD20-binding region, and wherein the remaining disulfide bond of the five disulfide bonds involves a cysteine residue in a first protein of the two proteins having the sequence of SEQ ID NOs: 47-175 at position 242, 482, 483, 484, 490, 491, 492, 493, 494, 495, 499, 500, 501, 502, 503, 504, 505, 510, 511, 512, 513 or 521 linked to a cysteine residue from a second protein of the two proteins having the sequence of SEQ ID NOs: 47-175 at position 242, 482, 483, 484, 490, 491, 492, 493, 494, 495, 499, 500, 501, 502, 503, 504, 505, 510, 511, 512, 513 or 521.

[0214] In some embodiments, the CD20-binding molecule as described herein is a homodimer and consists essentially of (a) two identical polypeptides, each represented by SEQ ID NO:49, and (b) a cysteine disulfide bond linking the two identical polypeptides involving the cysteine at amino acid position 490 of each of the two identical polypeptides.

[0215] In some embodiments, the CD20-binding molecule as described herein is a homodimer and consists essentially of (a) two identical polypeptides, each represented by only one of SEQ ID NO:50, SEQ ID NO:61, SEQ ID NO:73, SEQ ID NO:96, SEQ ID NO:101, or SEQ ID NO:102, and (b) a cysteine disulfide bond linking the two identical polypeptides involving the cysteine at amino acid position 501 of each of the two identical polypeptides.

[0216] In some embodiments, the CD20-binding molecule as described herein is a homodimer and consists essentially of (a) two identical polypeptides, each represented by only one of SEQ ID NO:53, SEQ ID NO:63, SEQ ID NO:66, SEQ ID NO:75, SEQ ID NO:83, SEQ ID NO:89, or SEQ ID NO:95, and (b) a cysteine disulfide bond linking the two identical polypeptides involving the cysteine at amino acid position 512 of each of the two identical polypeptides.

[0217] In some embodiments, the CD20-binding molecule as described herein is a homodimer and consists essentially of (a) two identical polypeptides, each represented by only one of SEQ ID NO:54, SEQ ID NO:57, SEQ ID NO:69, SEQ ID NO:78, SEQ ID NO:82, SEQ ID NO:84, SEQ ID NO:87, SEQ ID NO:88, SEQ ID NO:94, SEQ ID NO:110, SEQ ID NO:111, or SEQ ID NO:115, and (b) a cysteine disulfide bond linking the two identical polypeptides involving the cysteine at amino acid position 503 of each of the two identical polypeptides.

[0218] In some embodiments, the CD20-binding molecule as described herein is a homodimer and consists essentially of (a) two identical polypeptides, each represented by SEQ ID NO:54, and (b) a cysteine disulfide bond linking the two identical polypeptides involving the cysteine at amino acid position 503 of each of the two identical polypeptides.

[0219] In some embodiments, the CD20-binding molecule as described herein is a homodimer and consists essentially of (a) two identical polypeptides, each represented by only one of SEQ ID NO:55, SEQ ID NO:64, SEQ ID NO:67, SEQ ID NO:76, SEQ ID NO:90, SEQ ID NO:92, SEQ ID NO:93, SEQ ID NO:97, or SEQ ID NO:98, and (b) a cysteine disulfide bond linking the two identical polypeptides involving the cysteine at amino acid position 502 of each of the two identical polypeptides.

[0220] In some embodiments, the CD20-binding molecule as described herein is a homodimer and consists essentially of (a) two identical polypeptides, each represented by only one of SEQ ID NO:56, SEQ ID NO:68, SEQ ID NO:91, SEQ ID NO:99, SEQ ID NO:103, or SEQ ID NO:104, and (b) a cysteine disulfide bond linking the two identical polypeptides involving the cysteine at amino acid position 492 of each of the two identical polypeptides.

[0221] In some embodiments, the CD20-binding molecule as described herein is a homodimer and consists essentially of (a) two identical polypeptides, each represented by only one of SEQ ID NO:58, SEQ ID NO:70, or SEQ ID NO:81, and (b) a cysteine disulfide bond linking the two identical polypeptides involving the cysteine at amino acid position 493 of each of the two identical polypeptides.

[0222] In some embodiments, the CD20-binding molecule as described herein is a homodimer and consists essentially of (a) two identical polypeptides, each represented by only one of SEQ ID NOs: 249-304, and (b) a cysteine disulfide bond linking the two identical polypeptides involving the cysteine at amino acid position 242 of each of the two identical polypeptides.

[0223] It is within the scope as described herein to use fragments, variants, and/or derivatives of the proteins of the CD20-binding molecules as described herein, such as, e.g., proteins which contain two or more, functional, CD20 binding regions, and even more preferably two CD20 binding regions capable of binding an extracellular part of CD20 with high affinity (e.g. as determined using the CD20 binding region's K_{D} empirically measured with a CD20-expressing cell(s) or in vitro with a CD20 target molecule(s)). For example, while polypeptides that can bind to CD20 are provided herein, any binding region that binds to an extracellular part of CD20 with a dissociation constant of 10⁻⁵ to 10⁻¹² moles per liter, preferably less than 200 nM, may be suitable for use in making CD20-binding molecules as described herein, and related compositions and methods described herein.

### III. General Functions of the CD20-Binding Molecule and Compositions Thereof

[0224] Provided herein are various CD20-binding molecules and compositions thereof wherein each CD20-binding molecule comprises 1) two or more CD20 binding regions for cell targeting; and 2) at least one Shiga toxin effector polypeptide region. The linking of multiple cell targeting, CD20 binding regions with Shiga toxin Subunit A derived polypeptides enables the cell type-specific targeting of the potent Shiga toxin cytotoxicity and/or cytostasis, as well as the ability to deliver exogenous materials into the interiors of CD20+ cell types, such as, e.g., intracellularly cytotoxic agents.

[0225] In some embodiments, the CD20-binding molecule as described herein, and compositions thereof, may be used to target potent Shiga toxin cytotoxicity, cytostasis, rapid intracellular delivery of cargo, or other cellular internalization function to various, CD20-expressing cell types. In some embodiments, the CD20-binding molecule as described herein are capable of binding extracellular CD20 molecules associated with the cell surfaces of particular cell types and rapidly entering those cells. Once internalized within a targeted cell, certain embodiments of the CD20-binding molecules as described herein are capable of routing a cytotoxic Shiga toxin effector polypeptide fragment into the cytosol of the target cell. Once in the cytosol of a targeted cell, certain embodiments of the cytotoxic CD20-binding molecules as described herein are capable of enzymatically inactivating ribosomes, interfering with cell homeostasis, and eventually killing the cell. In some embodiments, the CD20-binding molecule as described herein, and compositions thereof, may be used to deliver additional exogenous materials into CD20-expressing cells, such as, e.g., peptides, polypeptides, proteins, polynucleotides, and detection promoting agents to label the interiors of target cells for collecting diagnostically useful information.

### A. CD20 Positive Cell Kill Via Targeted Shiga Toxin Cytotoxicity

[0226] Because members of the Shiga toxin family are adapted to killing eukaryotic cells, CD20-binding molecules comprising a Shiga toxin effector region can show potent cell-kill activity. The A Subunits of members of the Shiga toxin family comprise enzymatic domains capable of killing a eukaryotic cell once in the cell's cytosol. Certain embodiments of the CD20-binding molecules as described herein, and compositions thereof, take advantage of this cytotoxic mechanism. Certain embodiments of the CD20-binding molecules as described herein, and compositions thereof, exhibit cell-targeted cytotoxicity via their Shiga toxin effector polypeptide regions.

[0227] In some embodiments of the CD20-binding molecules as described herein, and compositions thereof, upon contacting a cell physically coupled with extracellular CD20 having the extracellular part bound by the binding regions of the CD20-binding molecule as described herein, the CD20-binding molecule as described herein, and/or a composition thereof, is capable of causing the death of the cell. In some embodiments, the capability to cause the death of the cell requires an intracellular mechanism, such as, e.g., a catalytic activity of a toxin effector polypeptide region.

[0228] The killing of a CD20-expressing cell(s) may be accomplished using a cytotoxic CD20-binding molecule as described herein, and/or a composition thereof, under varied conditions of CD20-expressing target cells, such as an ex vivo manipulated target cell, a target cell cultured in vitro, a target cell within a tissue sample cultured in vitro, and/or a target cell in vivo.

[0229] The expression of CD20 at a cellular surface need not be native to achieve targeted cell killing by a cytotoxic CD20-binding molecule as described herein and/or composition thereof. Cell-surface expression of CD20 by a target cell could be the result of an infection, the presence of a pathogen, and/or the presence of an intracellular microbial pathogen. Expression of CD20 by a target cell could be artificial or engineered such as, for example, by forced or induced expression after infection with a viral expression vector, see e.g. adenoviral, adeno-associated viral, and retroviral systems. An example of inducing expression of CD20 is the up-regulation of CD20 induced by exposing a cell to ionizing radiation.

[0230] Whether a particular cell type or cell population expresses CD20 at a cellular surface can be determined by methods well known in the art. For example, both FACS methods and immunohistochemical methods using anti-CD20 antibodies are known in the art may be used to as assays to determine cells which express CD20 at a cellular surface (CD20+ cells) and, thus, determine which cells have a particular extracellular CD20 target biomolecule physically coupled to them. In addition, the density of CD20 expression at a cell surface of a CD20+ cell type may be assayed using methods known in the art, including but not limited to the methods mentioned herein.

[0231] The effectiveness and potency of CD20-binding molecules as described herein toward different target cells may be influenced by the densities of their CD20 target antigen(s) on a target cell surface, the locations of their epitope-binding interaction with CD20, the rates of CD20 internalization of cell-surface bound CD20 of different target cells, and the intracellular itinerary of different target cells.

[0232] The cell surface representation and/or density of an extracellular CD20 target may influence the applications for which certain CD20-binding molecules as described herein, or compositions thereof, may be most suitably used. Differences in cell surface representation and/or density of certain extracellular CD20 target(s) between cells may alter the internalization and/or cytotoxicity of a given CD20-binding molecule described herein, or composition thereof, both quantitatively and qualitatively. The total cell surface representation of CD20 and/or of certain CD20 epitope(s) on a particular cell or population of cells may be determined using methods known to the skilled worker, such as by using fluorescence-activated cell sorting (FACS), flow-cytometry techniques.

[0233] The cell surface representation and/or density of a given extracellular CD20 target (or extracellular epitope of a given CD20 target) may influence the applications for which certain CD20-binding molecules as described herein may be most suitably used. Differences in cell surface representation and/or density of a given CD20 target(s) or epitope(s) between cells may alter, both quantitatively and qualitatively, the efficiency of cellular internalization, and/or potency of cytotoxicity of a given CD20-binding molecule as described herein. The cell surface representation and/or density of a given extracellular CD20 target or epitope may vary greatly among CD20 positive cells or even on the same cell at different points in the cell cycle or cell differentiation. The total cell surface representation of a given extracellular CD20 target (e.g. a particular extracellular epitope of a given CD20) on a particular cell or population of cells may be determined using methods known to the skilled worker, such as methods involving fluorescence-activated cell sorting (FACS) flow cytometry.

[0234] An example of a FACS based assay for determining cell surface representation of an extracellular CD20 antigen for a particular cell type is as follows. An anti-CD20 antibody is labeled with a fluorophore, such as, e.g. a fluorescein derivative like fluorescein isothiocyanate (FITC), an Alexa Fluor® Dye like Alexa488, or some other fluorescent tag. A population of cells of the cell type of interest are grown and harvested at a density of 1×10⁶ cells per milliliter (mL) and treated with 0.1 to 1.0 milligrams (mg) per mL (mg/mL) of labeled anti-CD20 antibody for 30 minutes on ice. Then the cold, treated cells are washed twice to remove unbound antibody. Alternatively, an unlabeled anti-CD20 antibody is used and is detected by a secondary antibody, such as, e.g., an anti-mouse IgG conjugated with a fluorophore, such as, e.g., Alexa488 or FITC. Direct immunofluorescence is used to quantify the amount of extracellular CD20 such as by using a FACS device.

[0235] For example, cell-surface CD20 is usually expressed at high levels by B-cells as compared to other cell surface targets, such as at levels of 250,000 cell-surface CD20 molecules per cell, which provides a large density of extracellular CD20 targets for the CD20-binding molecules as described herein.

[0236] For certain embodiments of the CD20-binding molecule, and compositions thereof, the ability, upon contacting a cell physically coupled with extracellular CD20 having the extracellular part bound by the binding regions of the CD20-binding molecule, of killing the cell may or may not depend on the catalytic activity of one or more Shiga toxin effector regions of the CD20-binding molecule. In some embodiments of the CD20-binding molecules as described herein, and compositions thereof, upon contacting a cell physically coupled with extracellular CD20 having the extracellular part bound by the binding regions of the CD20-binding molecule, the CD20-binding molecule as described herein, and/or a composition thereof, is capable of causing the death of the cell. In some embodiments, the CD20-binding molecule as described herein either (1) comprises a Shiga toxin effector region(s) that lacks catalytic activity and/or is not capable of causing the death of a cell through a Shiga toxin effector-mediated, ribosome inactivation mechanism; or (2) does not comprise any Shiga toxin effector region.

[0237] Certain embodiments of the multivalent CD20-binding molecules described herein, and enriched compositions thereof, exhibit unexpectedly potent, cell-targeted cytotoxicity potencies compared to monovalent CD20-binding molecules and/or compositions thereof which lack CD20-binding molecule(s) or have lower proportions of multivalent CD20-binding molecule(s) to the total CD20-binding molecule than an enriched composition (i.e., a CD20-binding molecule composition comprising that multivalent CD20-binding molecule). Without being bound by any theory, the CD20-binding valence-related improvement in function(s) between monovalent CD20-binding molecules and multivalent CD20-binding molecules result from the CD20-binding structure in a way that is believed to be more than just a result of CD20-binding valency effect(s), but rather, seems to result from a de novo property(ies) of the CD20-binding structures that is not present in certain monovalent CD20-binding variants. Without being bound by any theory, multivalent CD20-binding molecules as described herein, and enriched compositions thereof, that exhibit cytotoxic potencies that are unexpectedly greater in a qualitative and/or quantitative manner compared to a monovalent CD20-binding variant may exhibit such levels of cytotoxic potency as a result of an improvement(s), such as, e.g., in the molecule's efficiency of 1) cellular internalization into a CD20-expressing cell(s), 2) intracellular routing after cellular internalization to a certain subcellular compartment(s), and/or 3) delivering a Shiga toxin effector polypeptide to the cytosol.

[0238] In some embodiments, a multivalent CD20-binding molecule comprises one or more monovalent CD20-binding molecule components; and whereby upon administration of the multivalent CD20-binding molecule, or a composition thereof, to a population of cells physically coupled with CD20 (e.g. CD20+ cells), which have the extracellular part bound by two or more CD20 binding regions of the multivalent CD20-binding molecule, the multivalent CD20-binding molecule exhibits a cytotoxic effect which is greater than a cytotoxic effect resulting from administration of an equivalent amount, mass, or molarity of any one of the monovalent CD20-binding molecule components of the multivalent CD20-binding molecule to a population of the same type of CD20 positive cells under same conditions (e.g., same temperature, cell density, and assay time duration) by a factor of 1.33, 1.5, 1.75, 2, 3, 5, 7.5, 10, 20, 100, or greater than (1) the change in CD20-binding valence between the monovalent CD20-binding component and the multivalent CD20-binding molecule; (2) the change in equilibrium binding constants (K_{D}) between the multivalent CD20-binding molecule and the monovalent CD20-binding component for binding to CD20 or CD20-expressing cell; and/or (3) the change in affinity constant (1/K_{D}) between the multivalent CD20-binding molecule and the monovalent CD20-binding component for binding to CD20 or CD20-expressing cell. In some embodiments, members of the population of cells express at a cellular surface the CD20 which (1) have the extracellular part bound by the two or more CD20 binding regions of the multivalent CD20-binding molecule wherein each CD20 binding region is tested in isolation from the multivalent CD20-binding molecule, (2) have a transmembrane domain, and (3) remain physically coupled to the cell. In some embodiments, members of the population of cells are CD20 positive cells. For certain embodiments, the members of the population of cells are physically coupled with a significant amount of extracellular CD20 which (1) have the extracellular part bound by the two or more CD20 binding regions of the multivalent CD20-binding molecule. In some embodiments, members of the population of cells are descendants or members of a B-cell lineage. In some embodiments, members of the population of cells are members of the following groups: malignant B-cell, B-cell leukemia cell, B-cell lymphoma cell, B-cell myeloma cell, acute myeloid leukemia cell, acute non-lymphocytic leukemia cell, B-cell chronic lymphocytic leukemia cell, B-cell lymphoma cell, B-cell non-Hodgkin's lymphoma cell, B-cell precursor acute lymphoblastic leukemia cell, B-cell prolymphocytic leukemia cell, Burkitt's lymphoma cell, chronic lymphocytic leukemia cell, chronic myeloid leukemia cell, diffuse large B-cell lymphoma cell, follicular lymphoma cell, hairy cell leukemia cell, Hodgkin's lymphoma cell, immunoblastic large cell lymphoma cell, mantle cell lymphoma cell, melanoma cell, multiple myeloma cell, neoplastic plasma cell, nodular lymphocyte predominant Hodgkin's lymphoma cell, non-Hodgkin's lymphoma cell, plasmablastic lymphoma cell, plasma cell myeloma cell, precursor B-lymphoblastic lymphoma cell, small lymphocytic lymphoma cell, malignant T-cell, T-cell leukemia cell, T-cell lymphoma cell, T-cell large granular lymphocyte leukemia cell, T-cell prolymphocytic leukemia, healthy B-cell lineage cell or healthy T-cell.

### B. Selective Cytotoxicity Among a Mixture of Different Cells

[0239] The cytotoxic CD20-binding molecules as described herein, and compositions thereof, are useful for the elimination of populations of specific cell types within the presence of untargeted cells or “bystander” cells. For example, the cytotoxic CD20-binding molecules described herein, and compositions thereof, are useful for the treatment of certain tumors, cancers, and/or growth abnormalities by eliminating CD20-expressing cells that express elevated levels of CD20 at one or more cellular surfaces. By targeting the delivery of enzymatically active Shiga toxin regions using multiple, high-affinity CD20 binding regions to CD20 expressing cells, Shiga toxin cell-kill activity can be restricted to preferentially killing CD20-expressing cell types that express CD20 at a cellular surface (e.g. CD20+ cells), such as, e.g., certain neoplastic or malignant plasma cells, in the presence of two or more cell types where at least one cell type population expresses more CD20 than at least one other cell type population.

[0240] In some embodiments, the cytotoxic CD20-binding molecule as described herein is capable of selectively or preferentially causing the death of a specific cell type within a mixture of two or more different cell types. This enables the targeted cytotoxic activity to specific cell types with a high preferentiality, such as a 3-fold cytotoxic effect, over “bystander” cell types that do not express extracellular CD20.

[0241] In some embodiments, administration of the CD20-binding molecule as described herein to a mixture of cell types, the CD20-binding molecule is capable of selectively killing CD20-expressing cells displaying an extracellular CD20 target compared to cell types lacking extracellular CD20 target(s) of the binding region(s) of the CD20-binding molecule.

[0242] In some embodiments, upon administration of the cytotoxic CD20-binding molecule as described herein to a mixture of cell types, the cytotoxic CD20-binding molecule is capable of selectively killing CD20+ cells expressing an extracellular CD20 target biomolecule compared to cells lacking any cell-surface expression of extracellular CD20 target biomolecules.

[0243] Certain CD20 positive, cell types may be killed by a CD20-binding molecule as described herein, or compositions thereof, in the presence of other cells, including other CD20 positive cells, based on different levels of extracellular CD20 target expression among the target cells and non-target cells. For example, cells which overexpress CD20 may be killed among healthy cells, whether the healthy cells are expressing CD20 or not.

[0244] A cell which “overexpresses” a target biomolecule includes a cell which has significantly higher levels of the target biomolecule physically coupled at its cell surface compared to a healthy cell of the same tissue type. Overexpression may be caused by a variety of circumstances, such as, e.g., gene amplification, increased transcription, increased translation, reduced CD20 shedding, and/or reduced removal of the CD20 target biomolecule. The skilled worker may determine overexpression of a particular target biomolecule using methods known in the art.

[0245] Levels of extracellular CD20 target biomolecules on the surface of cells may be determined using various methods known to the skilled worker, such as, e.g., FACS methods. As used herein, a significant amount of an extracellular CD20 expressed at a cellular surface is greater than 10,000, 20,000, 30,000, 40,000, or 50,000 mean fluorescence intensity (MFI) by FACS analysis depending on the cell type.

[0246] The cytotoxic CD20-binding molecules as described herein are useful for reducing or eliminating populations of a specific cell type(s). For example, the cytotoxic CD20-binding molecules described herein are useful for the treatment of certain tumors, cancers, and/or growth abnormalities by eliminating CD20+ cells that express elevated levels of CD20 at one or more cellular surfaces (e.g. cells characterized as overexpressing CD20).

[0247] In some embodiments, a CD20-binding molecule may be used to target cytotoxic activity to specific cell types with a high preferentiality, such as with at least a 3-fold cytotoxic effect, over “bystander” cell types that are CD20+ but express cell-surface CD20 at lower cell surface amounts or densities than target cells. The expression of CD20 may be non-exclusive to one cell type if extracellular CD20 is expressed in low enough amounts by cell types that are not to be targeted. Thus, preferential killing of one CD20 positive cell type may be accomplished in mixtures of multiple CD20+ where some CD20+ cell types are bystander cells, such as mixtures of CD20+ cell types with varying CD20 expression levels, optionally in the presence of CD20 negative cells as well. This enables the preferential cell-killing of high-expressing CD20 cell types, such as a 3-fold cytotoxic effect, over “bystander” cell types that do not express significant amounts of CD20 or do not expose significant amounts of an extracellular CD20 target of at least one of the CD20 binding regions of the cytotoxic CD20-binding molecules.

[0248] In some embodiments, the cytotoxic activity of a CD20-binding molecule toward populations of cell types physically coupled with an extracellular CD20 target is at least 3-fold higher than the cytotoxic activity toward populations of cell types not physically coupled with significant amounts of an extracellular CD20 target bound specifically by at least one of the CD20 binding regions of that CD20-binding molecule. Selective cytotoxicity may be quantified in terms of the ratio (a/b) of (a) cytotoxicity towards a population of cells physically coupled with a significant amount of an extracellular CD20 target of at least one of the CD20 binding regions of the CD20-binding molecule to (b) cytotoxicity towards a population of cells of a cell type not physically coupled with a significant amount of an extracellular CD20 target of at least one of the CD20 binding regions of the CD20-binding molecule.

[0249] In some embodiments, the cytotoxicity ratio is indicative of the selective cytotoxicity which is at least 3-fold, 5-fold, 10-fold, 15-fold, 20-fold, 25-fold, 30-fold, 40-fold, 50-fold, 75-fold, 100-fold, 250-fold, 500-fold, 750-fold, 1000-fold or higher for populations of cells or cell types expressing or physically coupled with an extracellular CD20 target of at least one of the CD20 binding regions of the CD20-binding molecule compared to populations of cells or cell types which do not express an extracellular CD20 target or that are not physically coupled with significant amounts of an extracellular CD20 target bound specifically by at least one of the CD20 binding regions of the CD20-binding molecule as described herein. For example, upon administration of a certain CD20-binding molecule as described herein to two different populations of cells which differ with respect to the presence and/or polypeptide sequence of extracellular CD20 target biomolecule, the CD20-binding molecule is capable of causing cell death to the cell type(s) physically coupled with an extracellular CD20 target biomolecule bound by at least one of the CD20-binding molecule's CD20 binding regions, e.g., at a CD₅₀ at least three times less than the CD₅₀ of binding to cell types that are not physically coupled with an extracellular CD20 target of the CD20-binding molecule's CD20 binding region.

[0250] In some embodiments of the CD20-binding molecules as described herein, upon administration of the CD20-binding molecule to two different populations of cell types, the CD20-binding molecule is capable of causing cell death as defined by the half-maximal cytotoxic concentration (CD₅₀) to a first cell population, whose members express CD20 at a cellular surface, at a dose at least three-times lower than the CD₅₀ dose of the same CD20-binding molecule to a second population of cells whose members do not express CD20, do not express a significant amount of CD20, or are not exposing a significant amount of an extracellular CD20 target of at least one of the CD20 binding regions of the CD20-binding molecule.

[0251] Selective cytotoxicity may be quantified in terms of the ratio (a/b) of (a) cytotoxicity towards a population of CD20+ cells to (b) cytotoxicity towards a population of CD20 negative cells. In some embodiments, the cytotoxicity ratio is indicative of selective cytotoxicity which is at least 3-fold, 5-fold, 10-fold, 15-fold, 20-fold, 25-fold, 30-fold, 40-fold, 50-fold, 75-fold, 100-fold, 250-fold, 500-fold, 750-fold, or 1000-fold higher for populations of CD20+ cells or CD20+ cell populations compared to CD20− cells or CD20− cell populations. For example, administration of certain embodiments of the CD20-binding molecule to two different populations of cell types with respect to the presence of an extracellular CD20 target biomolecule, the CD20-binding molecule is capable of causing cell death to the CD20 target biomolecule positive cells at a CD₅₀ at least three times less than the CD₅₀ to CD20 target biomolecule negative cells.

[0252] Particular CD20 expression levels within an organism may be limited to unique cells, tissues, cell types, conditions, disease states, disorders, and/or cellular contexts. CD20 may be overexpressed by cells involved in many disease states, such as, e.g., by malignant immune cells, tumor cells, and cancer cells. CD20 may be expressed by cells (e.g. healthy cells) which are overactive or providing a detrimental effect to the organism resulting in a condition, disease, or disorder.

[0253] In some embodiments, administration of a CD20-binding molecule composition to a mixture of cell types, the CD20-binding molecule composition is capable of selectively killing CD20-expressing cells displaying an extracellular CD20 target compared to cell types lacking an extracellular CD20 target(s) of the CD20-binding molecule of the composition.

[0254] In some embodiments, administration of a CD20-binding molecule composition to two populations of cell types which differ in the presence and/or polypeptide sequence of a extracellular CD20 target, the CD20-binding molecule composition is capable of causing cell death as defined by the half-maximal cytotoxic concentration (CD₅₀) to a population of CD20+ target cells, e.g., at a dose at least three times lower than the CD₅₀ dose of the same CD20-binding molecule composition to a CD20− cell population.

[0255] In some embodiments, the CD20-binding molecule compositions as described herein are capable of selectively or preferentially causing the death of a specific cell type within a mixture of two or more different cell types. This enables targeting cytotoxic activity to specific cell types with a high preferentiality, such as with at least a 3-fold cytotoxic effect, over “bystander” cell types that do not express any significant amount of the appropriate extracellular CD20 target(s), such as, e.g., CD20 negative cells. This enables the targeted cell-killing of specific cell types expressing CD20 on cellular surfaces with a high preferentiality, such as with at least a 3-fold cytotoxic effect, over “bystander” cell types that do not express significant amounts of the appropriate CD20 target(s) or are not exposing significant amounts of the appropriate CD20 target at a cellular surface.

[0256] Levels of extracellular CD20 expressed on the surface of a cell or cell population may be determined using various methods known to the skilled worker, such as, e.g., FACS methods. As used herein, a significant amount of an extracellular CD20 expressed at a cellular surface is greater than 10,000, 20,000, 30,000, 40,000, or 50,000 mean fluorescence intensity (MFI) by FACS analysis depending on the cell type.

[0257] Alternatively, certain CD20-binding molecules as described herein, and compositions thereof, enable targeting cytotoxic activity to specific cell types with a high preferentiality, such as with at least a 3-fold cytotoxic effect, over “bystander” cell types that are CD20+ but express CD20 at lower cell surface amounts or densities than target cells. Thus, preferential killing of one CD20 positive cell type may be accomplished in mixtures of multiple CD20+ cell types where some CD20+ cell types are bystander cells, such as mixtures of CD20+ cell types with varying CD20 expression levels, and optionally in the presence of CD20 negative cells as well.

[0258] In some embodiments, the cytotoxic activity toward populations of cell types physically coupled with an extracellular CD20 target is at least 3-fold higher than the cytotoxic activity toward populations of cell types not physically coupled with significant amounts of extracellular CD20 target(s) of at least one of the CD20 binding regions of the cytotoxic CD20-binding molecule as described herein. Selective cytotoxicity may be quantified in terms of the ratio (a/b) of (a) cytotoxicity towards a population of cells physically coupled with a significant amount of an extracellular CD20 target of at least one of the CD20 binding regions of the cytotoxic CD20-binding molecule to (b) cytotoxicity towards a population of cells of a cell type not physically coupled with a significant amount of an extracellular CD20 target of at least one of the CD20 binding regions of the cytotoxic CD20-binding molecule. In some embodiments, the cytotoxicity ratio is indicative of selective cytotoxicity which is at least 3-fold, 5-fold, 10-fold, 15-fold, 20-fold, 25-fold, 30-fold, 40-fold, 50-fold, 75-fold, 100-fold, 250-fold, 500-fold, 750-fold, or 1000-fold higher for populations of cells or cell types expressing an extracellular CD20 target or physically coupled with an extracellular CD20 target of at least one of the CD20 binding regions of the cytotoxic CD20-binding molecule compared to populations of cells or cell types which do not express an extracellular CD20 target or are not physically coupled with significant amounts of an extracellular CD20 target of at least one of the CD20 binding regions of the cytotoxic CD20-binding molecule. For example, administration of certain embodiments of the CD20-binding molecule composition as described herein to two different populations of cell types with respect to the presence of an extracellular CD20 target biomolecule, the CD20-binding molecule composition is capable of causing cell death to the cell type(s) physically coupled with an extracellular CD20 target biomolecule of one or more of its CD20 binding regions at a CD₅₀ at least three times less than the CD₅₀ to cell types which are not physically coupled with an extracellular CD20 target of its CD20 binding region.

[0259] In some embodiments of the CD20-binding molecule composition as described herein, administration of the CD20-binding molecule composition to two different populations of cell types, the CD20-binding molecule composition is capable of causing cell death as defined by the half-maximal cytotoxic concentration (CD₅₀) to a first cell population, whose members express CD20 at a cellular surface, at a dose at least three-times lower than the CD₅₀ dose of the same CD20-binding molecule compositions to a second population of cells whose members do not express CD20, do not express a significant amount of CD20, or are not exposing a significant amount of an extracellular CD20 target of at least one of the CD20 binding regions of the CD20-binding molecule composition.

[0260] In some embodiments, the cytotoxic activity of a CD20-binding molecule composition as described herein toward populations of cell types expressing CD20 at a cellular surface is at least 3-fold higher than the cytotoxic activity toward populations of cell types not physically coupled with any extracellular CD20 target bound specifically by a CD20-binding molecule of the CD20-binding molecule composition.

[0261] Selective cytotoxicity may be quantified in terms of the ratio (a/b) of (a) cytotoxicity towards a population of cells expressing an extracellular CD20 target of a CD20 binding region of the embodiment to (b) cytotoxicity towards a population of cells of a cell type not physically coupled with any extracellular CD20 target of a CD20 binding region of the embodiment. In some embodiments, the cytotoxicity ratio is indicative of selective cytotoxicity which is at least 3-fold, 5-fold, 10-fold, 15-fold, 20-fold, 25-fold, 30-fold, 40-fold, 50-fold, 75-fold, 100-fold, 250-fold, 500-fold, 750-fold, or 1000-fold higher for populations of cells or cell types expressing CD20 compared to populations of cells or cell types which do not express CD20.

[0262] In some embodiments, the cytotoxic activity of a CD20-binding molecule composition as described herein toward populations of cell types physically coupled with an extracellular CD20 target is at least 3-fold higher than the cytotoxic activity toward populations of cell types not physically coupled with significant amounts of an extracellular CD20 target bound specifically by at least one of the CD20 binding regions of a CD20-binding molecule of the CD20-binding molecule composition. Selective cytotoxicity may be quantified in terms of the ratio (a/b) of (a) cytotoxicity towards a population of cells physically coupled with a significant amount of an extracellular CD20 target of at least one of the CD20 binding regions of a cytotoxic CD20-binding molecule as described herein to (b) cytotoxicity towards a population of cells of a cell type not physically coupled with a significant amount of an extracellular CD20 target of at least one of the CD20 binding regions of the cytotoxic CD20-binding molecule. In some embodiments, the cytotoxicity ratio is indicative of selective cytotoxicity which is at least 3-fold, 5-fold, 10-fold, 15-fold, 20-fold, 25-fold, 30-fold, 40-fold, 50-fold, 75-fold, 100-fold, 250-fold, 500-fold, 750-fold, 1000-fold or higher for populations of cells or cell types expressing an extracellular CD20 target or physically coupled with an extracellular CD20 target of at least one of the CD20 binding regions of a cytotoxic CD20-binding molecule of the composition described herein compared to populations of cells or cell types which do not express an extracellular CD20 target or that are not physically coupled with significant amounts of an extracellular CD20 target bound specifically by any of the CD20 binding regions of the cytotoxic CD20-binding molecule of the composition described herein. For example, upon administration of certain CD20-binding molecule compositions described herein to two different populations of cells which differ with respect to the presence and/or polypeptide sequence of extracellular CD20 target biomolecule, the CD20-binding molecule compositions are capable of causing cell death to the cell type(s) physically coupled with an extracellular CD20 target biomolecule bound by at least one of the CD20 binding regions of a CD20-binding molecule of the composition, e.g., at a CD₅₀ at least three times less than the CD₅₀ of binding to cell types that are not physically coupled with an extracellular CD20 target of any of the CD20-binding molecules of the composition.

[0263] In some embodiments of the CD20-binding molecule composition as described herein, upon administration of the CD20-binding molecule composition to two different populations of cell types, the CD20-binding molecule composition is capable of causing cell death as defined by the half-maximal cytotoxic concentration (CD₅₀) to a first cell population, whose members express CD20 at a cellular surface, at a dose at least three-times lower than the CD₅₀ dose of the same CD20-binding molecule composition to a second population of cells whose members do not express CD20, do not express a significant amount of CD20, or are not exposing a significant amount of an extracellular CD20 target of at least one of the CD20 binding regions of any cytotoxic CD20-binding molecule of the CD20-binding molecule composition.

[0264] This preferential cell-killing function allows a targeted CD20+ cell to be killed by certain CD20-binding molecules as described herein, and compositions thereof, under varied conditions and in the presence of non-targeted CD20− bystander cells, such as ex vivo manipulated mixtures of cell types, in vitro cultured tissues with mixtures of cell types, or in vivo in the presence of multiple cell types (e.g. in situ, in a native location within a multicellular organism, or at disease locus within a multicellular organism).

[0265] In some embodiments, upon administration of the CD20-binding molecule as described herein, and/or composition thereof, to a mixture of cell types, the CD20-binding molecule, and/or composition thereof, is capable of selectively killing CD20+ cells expressing an extracellular CD20 target biomolecule compared to cells lacking any cell-surface expression of extracellular CD20 target biomolecules. By targeting the delivery of enzymatically active Shiga toxin regions to specific cell types using high-affinity CD20 binding regions, this potent and selective cell-kill activity can be restricted to killing only CD20 expressing cells within in an organism.

[0266] In some embodiments described herein, the CD20-binding molecules as described herein, and compositions thereof, have applications in killing CD20+ cells in a disease, disorder or condition involving cells with abnormally high CD20 expression and/or ectopic CD20 expression. Various types of cells which express CD20 may be targeted by the CD20-binding molecules as described herein, and compositions thereof, for cell killing and/or cytostasis. For example, there are various types of CD20+ cells which function in various biological processes including autoimmune conditions, neoplastic B-cell proliferation, and hypersensitivity responses.

C. Delivery of an Additional, Exogenous Material into the Interior of a Target Cell

[0267] In addition to CD20-binding molecules as described herein, and compositions thereof, optionally may be used for delivery of additional exogenous materials into the interiors of target cells. The delivery of additional exogenous materials may be used, e.g., for cytotoxic, cytostatic, information gathering, and/or diagnostic functions. Nontoxic and reduced-cytotoxic variants of the cytotoxic CD20-binding molecules as described herein, or optionally toxic variants, may be used to deliver additional exogenous materials to and/or label the interiors of cells physically coupled with an extracellular CD20 molecule.

[0268] For example, certain embodiments of the CD20-binding molecules as described herein do not exhibit a significant level of Shiga toxin based cytotoxicity, such as, e.g., no significant cell death is observed at concentrations of a CD20-binding molecule as described herein of less than 1,000 nM, 500 nM, 100 nM, 75 nM, 50 nM in an in vitro cell culture, cell-kill assay. Similarly, at administration doses of 1-100 μg of a cell-targeting molecule as described herein per kg of a mammalian recipient, there will be no observable toxicity. This system is modular, in that any number of diverse CD20-binding regions can be used to target a CD20-binding molecule as described herein to various, diverse cell types, such as, e.g., cells of different mammalian species.

[0269] Various types of cells and/or cell populations which express CD20 at one or more cellular surfaces may be targeted by the CD20-binding molecules as described herein for receiving exogenous materials. The functional components as described herein are modular in that various Shiga toxin effector regions and additional exogenous materials may be linked to various CD20 binding regions to create varied CD20-binding molecules as described herein that are suitable for use in diverse applications, such as non-invasive, in vivo imaging of tumor cells.

[0270] Because the CD20-binding molecules, whether cytotoxic, reduced-cytotoxic, or nontoxic, and catalytically inactive forms thereof, are capable of entering cells physically coupled with CD20 molecule, some CD20-binding molecules as described herein may be used to deliver additional exogenous materials into the interior of targeted CD20+ cell types. In one sense, the entire CD20-binding molecule is an exogenous material which will enter the target cell; thus, the “additional” exogenous materials are heterologous materials linked to but other than the core CD20-binding molecule itself, which is composed of merely of the minimum required components to achieve rapid cellular internalization and/or efficient sub-cellular routing to the desired intracellular compartment(s).

[0271] In some embodiments, the CD20-binding molecule comprises an additional exogenous material. An “additional exogenous material” as used herein refers to one or more atoms or molecules that can be transported to the interior of a cell by a binding molecule. In some embodiments, an additional exogenous material is any material transported into the interior of a cell by a binding molecule, whether or not it is typically present in the native target cell or in a native Shiga toxin. In some embodiments, an additional exogenous material is a material that is not generally present in Shiga toxins and/or native target cells.

[0272] Non-limiting examples of additional exogenous materials are cytotoxic agents, peptides, polypeptides, proteins, polynucleotides, small molecule chemotherapeutic agents, radionuclides, and detection promoting agents.

[0273] Nontoxic variants and reduced cytotoxicity variants of the cytotoxic CD20-binding molecules as described herein, and compositions thereof, or optionally toxic variants, may be used to deliver additional exogenous materials and/or label the interiors of cells physically coupled with CD20 molecules bound by the CD20-binding molecules as described herein. Various types of cells and/or cell populations which express CD20 at a cellular surface may be targeted by the CD20-binding molecules as described herein, and compositions thereof, for killing and/or receiving exogenous materials, such as detection promoting agents. The system as described herein is modular, in that various Shiga toxin effector regions and additional exogenous materials may be linked to the same binding region to provide diverse applications, such as, e.g., non-invasive in vivo imaging of the interiors of tumor cells and/or immune cells.

[0274] In some embodiments, the additional exogenous material is a cytotoxic agent, such as, e.g., a small molecule chemotherapeutic agent, cytotoxic antibiotic, alkylating agent, antimetabolite, topoisomerase inhibitor, and/or tubulin inhibitor. Non-limiting examples of cytotoxic agents include aziridines, cisplatins, tetrazines, procarbazine, hexamethylmelamine, vinca alkaloids, taxanes, camptothecins, etoposide, doxorubicin, mitoxantrone, teniposide, novobiocin, aclarubicin, anthracyclines, actinomycin, bleomycin, plicamycin, mitomycin, daunorubicin, epirubicin, idarubicin, dolastatins, maytansines, docetaxel, adriamycin, calicheamicin, auristatins, pyrrolobenzodiazepine, carboplatin, 5-fluorouracil (5-FU), capecitabine, mitomycin C, paclitaxel, 1,3-Bis(2-chloroethyl)-1-nitrosourea (BCNU), rifampicin, cisplatin, methotrexate, and gemcitabine.

[0275] In some embodiments, the additional exogenous material comprises a protein or polypeptide comprising an enzyme. In certain other embodiments, the additional exogenous material is a nucleic acid, such as, e.g. a ribonucleic acid that functions as a small inhibiting RNA (siRNA) or microRNA (miRNA). In some embodiments, the additional exogenous material is an antigen, such as antigens derived from bacterial proteins, viral proteins, proteins mutated in cancer, proteins aberrantly expressed in cancer, or T-cell complementary determining regions. For example, exogenous materials include antigens, such as those characteristic of antigen-presenting cells infected by bacteria, and T-cell complementary determining regions capable of functioning as exogenous antigens. In some embodiments, the additional exogenous material comprises a proapoptotic peptide, polypeptide, or protein, such as, e.g., BCL-2, caspases, cytochromes, granzyme B, apoptosis-inducing factor (AIF), BAX, tBid (truncated Bid), and proapoptotic fragments or derivatives thereof. Additional examples of exogenous materials include proteins larger than an antigenic peptide, such as enzymes. Exogenous materials comprising a protein may optionally comprise one or more antigens whether known or unknown to the skilled worker.

[0276] In some embodiments of the CD20-binding molecules as described herein, and compositions thereof, for use in delivery of additional exogenous materials into the interior of a cell, the additional exogenous material is one or more radionucleides, such as, e.g., ²¹¹At, ¹³¹I, ¹²⁵I, ⁹⁰Y, ¹¹¹In, ¹⁸⁶Re, ¹⁸⁸Re, ¹⁵³Sm, ²¹²Bi, ³²P, ⁶⁰C, and/or radioactive isotopes of Lu.

[0277] In some embodiments, the CD20-binding molecule as described herein comprises an additional exogenous material for delivery into a cell, and the CD20-binding molecule comprises the protein shown in any one of SEQ ID NOs: 51-52, 59-61, 64-65, 71-73, 76-77, 82-83, 88-89, 94, 100, 106, 109-112, 115-118, 124, 132, 140, 145, 150, 156, 162, 168, 171, 174, 180-181, 189-190, 193-194, 200-202, 205-206, 211-212, 217-218, 223, 229, 235, 238-241, 244-247, 253, 261, 269, 274, 279, and 285; and optionally, the protein further comprises an amino-terminal methionine residue. In some embodiments, the CD20-binding molecule as described herein comprises or consists essentially of two proteins, each protein selected from any one of the polypeptides shown in SEQ ID NOs: 51-52, 59-61, 64-65, 71-73, 76-77, 82-83, 88-89, 94, 100, 106, 109-112, 115-118, 124, 132, 140, 145, 150, 156, 162, 168, 171, 174, 180-181, 189-190, 193-194, 200-202, 205-206, 211-212, 217-218, 223, 229, 235, 238-241, 244-247, 253, 261, 269, 274, 279, and 285; and optionally, each protein further comprises an amino-terminal methionine residue. In some embodiments, the protein is selected from any one of the proteins shown in SEQ ID NOs: 51-52, 59-61, 64-65, 71-73, 76-77, 82-83, 88-89, 94, 100, 106, 109-112, 115-118, 124, 132, 140, 145, 150, 156, 162, 168, 171, and 174, and further comprises a disulfide bond involving a cysteine residue at position 242, 482, 483, 484, 490, 491, 492, 493, 494, 495, 499, 500, 501, 502, 503, 504, 505, 510, 511, 512, 513, or 521.

[0278] For certain embodiments, upon administration of the CD20-binding molecule, and/or a composition thereof, to one or more cells physically coupled with CD20, which have the extracellular part bound by the two or more CD20 binding regions of the CD20-binding molecule, the CD20-binding molecule internalizes into one or more of the cells and delivers an additional exogenous material into the interior of the cell(s) or at least some of the cells.

[0279] For certain embodiments of the CD20-binding molecule as described herein and compositions thereof, a cellular internalization rate may be measured as the time after administration (on average) at which the CD20-binding molecule as described herein is observed inside a cell(s) and/or a majority of the cells contacted with the CD20-binding molecule and/or composition thereof. For example, the anti-CD20 monoclonal antibody rituximab typically reaches maximal cellular internalization at 37° C. after approximately 16 to 18 hours, and thus, in the context as described herein, a “rapid internalization” would indicate internalization rate several hours faster than that observed for rituximab, on average at the same temperature and receptor occupancy level.

[0280] For certain embodiments, upon administration of the CD20-binding molecule, and/or a composition thereof, to one or more cells physically coupled with CD20, which have the extracellular part bound by the two or more CD20 binding regions of the CD20-binding molecule, the CD20-binding molecule internalizes into one or more of the cells and delivers an additional exogenous material into the interior of the cell in about five hours, four hours, three hours, two hours, one hour, thirty minutes, or less at a physiological temperature appropriate for the cell and/or at about 37 degrees Celsius. In some embodiments, the cell(s) expresses at a cellular surface the CD20 which (1) have the extracellular part bound by the two or more CD20 binding regions of the CD20-binding molecule, (2) have a transmembrane domain, and (3) remain physically coupled to the cell. In some embodiments, the cell(s) is a CD20 positive cell. For certain embodiments, the cell(s) is physically coupled with a significant amount of extracellular CD20 which (1) have the extracellular part bound by the two or more CD20 binding regions of the CD20-binding molecule. For certain embodiments, the cell(s) is a descendant or member of a B-cell lineage. For certain embodiments, the cell(s) is a malignant B-cell, B-cell leukemia cell, B-cell lymphoma cell, B-cell myeloma cell, acute myeloid leukemia cell, acute non-lymphocytic leukemia cell, B-cell chronic lymphocytic leukemia cell, B-cell lymphoma cell, B-cell non-Hodgkin's lymphoma cell, B-cell precursor acute lymphoblastic leukemia cell, B-cell prolymphocytic leukemia cell, Burkitt's lymphoma cell, chronic lymphocytic leukemia cell, chronic myeloid leukemia cell, diffuse large B-cell lymphoma cell, follicular lymphoma cell, hairy cell leukemia cell, Hodgkin's lymphoma cell, immunoblastic large cell lymphoma cell, mantle cell lymphoma cell, melanoma cell, multiple myeloma cell, neoplastic plasma cell, nodular lymphocyte predominant Hodgkin's lymphoma cell, non-Hodgkin's lymphoma cell, plasmablastic lymphoma cell, plasma cell myeloma cell, precursor B-lymphoblastic lymphoma cell, small lymphocytic lymphoma cell, malignant T-cell, T-cell leukemia cell, T-cell lymphoma cell, T-cell large granular lymphocyte leukemia cell, T-cell prolymphocytic leukemia, healthy B-cell lineage cell, or healthy T-cell.

[0281] For purposes of certain embodiments as described herein, the phrase “in less than about thirty minutes” means that the maximal (or half-maximal in certain contexts) observed amount of intracellular CD20, CD20 antigen, and/or CD20-binding molecule during a internalization assay time course is observed at or before thirty minutes from the step of contacting CD20 positive cell(s) with the CD20-binding molecule as described herein as determined by an appropriate assay at conditions similar to 37° C. and 50 nM of CD20-binding molecule. The time of maximal or half-maximal intracellular accumulation may be determined by comparing intracellular accumulation at different times to find a peak or plateau. If a plateau is observed, then the maximal intracellular accumulation may be determined to be the first time the plateau reaches its highest point.

[0282] The extracellular CD20 cell surface density and the K_{D} of a CD20-binding molecule may be used to calculate the percent occupancy for a given concentration of CD20-binding molecule, such as a CD20-binding molecule as described herein or a reference CD20-binding molecule (e.g. monoclonal antibody) known to the skilled worker. For example, the CD20 receptor occupancy may be determined as a function of the 1) binding interaction between the extracellular CD20 receptor and CD20-binding molecule, 2) amount (e.g., concertation or effective concentration) of extracellular CD20 receptor available for binding, and 3) the amount (e.g., mass, concertation, or molarity) of CD20-binding molecule present in a given situation.

[0283] In some embodiments, internalization rates of a CD20-binding molecule as described herein compared to a CD20 antibody known in the art may be determined using assays performed at comparable extracellular CD20 receptor occupancies, instead of being determined using assays performed at comparable concentrations of the administered CD20-binding molecules (i.e. a CD20-binding molecule as described herein and a reference, anti-CD20 antibody of prior art). The percent CD20 receptor occupancy (RO_{CD20}) may be determined using models and formulae, such as, e.g.,

$${RO}_{CD 20} = \frac{\begin{matrix}{K}_{D} + {A}_{tot} + CD {20}_{tot} - \\ \sqrt{{( - {K}_{D} - {A}_{tot} - CD {20}_{tot} )}^{2} - 4 \cdot {A}_{tot} \cdot CD {20}_{tot}}\end{matrix}}{2 \cdot CD {20}_{tot}}$$

where RO is the receptor occupancy of the extracellular CD20 in the internalization assay, K_{D} is the dissociation constant of the CD20 binding molecule of interest to the extracellular CD20 receptor, Aₜₒₜ is the total number of CD20 binding molecules in the assay, and CD20ₜₒₜ is the total number of cell surface CD20 molecules in the assay.

[0284] In some embodiments of the CD20-binding molecule as described herein, which comprises an additional exogenous material; whereby upon administration of the CD20-binding molecule, or a composition thereof, to a plurality of cells physically coupled with CD20, which have the extracellular part bound by the two or more CD20 binding regions of the CD20-binding molecule, at a concentration of CD20-binding molecule equivalent to five or thirty-eight percent to fifty percent cell-surface occupancy, the majority of the CD20-binding molecule internalizes into the plurality of cells and delivers the additional exogenous material into the interiors of the majority of the plurality of cells in about five hours, four hours, three hours, two hours, one hour, thirty minutes, or less at a physiological temperature appropriate for the cell and/or at about 37 degrees Celsius. In some embodiments, members of the plurality of cells express at a cellular surface the CD20 which (1) have the extracellular part bound by the two or more CD20 binding regions of the CD20-binding molecule, (2) have a transmembrane domain, and (3) remain physically coupled to the cell. In some embodiments, members of the plurality of cells are CD20 positive cells. For certain embodiments, the members of the plurality of cells are physically coupled with a significant amount of extracellular CD20 which (1) have the extracellular part bound by the two or more CD20 binding regions of the CD20-binding molecule. In some embodiments, members of the plurality of cells are descendants or members of a B-cell lineage. For certain embodiments, members of the plurality of cells are members of the following group of cells: malignant B-cell, B-cell leukemia cell, B-cell lymphoma cell, B-cell myeloma cell, acute myeloid leukemia cell, acute non-lymphocytic leukemia cell, B-cell chronic lymphocytic leukemia cell, B-cell lymphoma cell, B-cell non-Hodgkin's lymphoma cell, B-cell precursor acute lymphoblastic leukemia cell, B-cell prolymphocytic leukemia cell, Burkitt's lymphoma cell, chronic lymphocytic leukemia cell, chronic myeloid leukemia cell, diffuse large B-cell lymphoma cell, follicular lymphoma cell, hairy cell leukemia cell, Hodgkin's lymphoma cell, immunoblastic large cell lymphoma cell, mantle cell lymphoma cell, melanoma cell, multiple myeloma cell, neoplastic plasma cell, nodular lymphocyte predominant Hodgkin's lymphoma cell, non-Hodgkin's lymphoma cell, plasmablastic lymphoma cell, plasma cell myeloma cell, precursor B-lymphoblastic lymphoma cell, small lymphocytic lymphoma cell, malignant T-cell, T-cell leukemia cell, T-cell lymphoma cell, T-cell large granular lymphocyte leukemia cell, T-cell prolymphocytic leukemia, healthy B-cell lineage cell, or healthy T-cell.

[0285] Because certain CD20-binding molecules as described herein, and compositions thereof, exhibit specific cell-targeting and efficient cellular internalization (e.g. within thirty minutes after administration), a cytotoxic cargo (such as, e.g., a cytotoxic agent, ribonucleic acid, antigen, and/or proapoptotic peptide) conjugated to a CD20-binding molecule as described herein can be efficiently delivered into a CD20-expressing cell for the purpose of killing the cell. Because certain CD20-binding molecules as described herein, and compositions thereof, exhibit selective cell-targeting and efficient cellular internalization (e.g. within thirty minutes after administration), a cytotoxic cargo (such as, e.g., a cytotoxic agent, ribonucleic acid, antigen, and/or proapoptotic peptide) conjugated to a CD20-binding molecule as described herein can be selectively and efficiently delivered into a CD20-expressing cell for the purpose of killing the cell in the presence of other cells, including other CD20-expressing cells which express lower levels of CD20 than the targeted cell(s).

### D. Information Gathering for Diagnostic Functions

[0286] Certain CD20-binding molecules as described herein, and compositions thereof, have uses in the in vitro and/or in vivo detection of specific cells, cell types, cell populations, and/or subcellular compartments of any of the foregoing. In some embodiments, the CD20-binding molecules as described herein, and compositions thereof, are used for both diagnosis and treatment, or for diagnosis alone. When the same cytotoxic CD20-binding molecule is used for both diagnosis and treatment, the cytotoxic CD20-binding molecule variant which incorporates a detection promoting agent for diagnosis may be rendered nontoxic or to exhibit reduced cytotoxicity by catalytic inactivation of its Shiga toxin effector region(s) via one or more amino acid substitutions, such as, e.g., illustrative substitutions described herein, e.g. such that at a given dose (e.g., less than 1 mg/kg) there is no observable reduction in a CD20 target positive cell. Reduced-cytotoxic variants may still be cytotoxic at certain concentrations or dosages but exhibit reduced cytotoxicity, such as, e.g., are not capable of exhibiting a significant level of Shiga toxin cytotoxicity in a given in vitro cell-kill assay. Nontoxic or reduced-cytotoxic forms of the cytotoxic CD20-binding molecules described herein that are conjugated to detection promoting agents optionally may be used for diagnostic functions, such as for companion diagnostics used in conjunction with a therapeutic regimen comprising the same or a related CD20 binding region for cell-targeting and/or involving the same or a related CD20 epitope for targeted therapy.

[0287] The ability to conjugate detection promoting agents known in the art to various cytotoxic CD20-binding molecules as described herein provides useful compositions for the detection of cancer, tumor, and immune cells, as well as subcellular compartments of the foregoing. These diagnostic embodiments of the CD20-binding molecules as described herein, and compositions thereof, may be used for information gathering via various imaging techniques and assays known in the art. For example, diagnostic embodiments of the CD20-binding molecules as described herein may be used for information gathering via imaging of intracellular organelles (e.g. endocytotic, Golgi, endoplasmic reticulum, and cytosolic compartments) of individual cancer cells, neoplastic cells, malignant tumor cells, non-malignant tumor cells, immune cells, and/or hematological cells in a patient or biopsy sample.

[0288] Various types of information may be gathered using the diagnostic embodiments of the CD20-binding molecules as described herein, and compositions thereof, whether for diagnostic uses or other uses. This information may be useful, for example, in diagnosing CD20 positive, neoplastic cell types; determining therapeutic susceptibilities of a patient's disease; assaying the progression of anti-neoplastic therapies over time; assaying the progression of immunomodulatory therapies over time; assaying the progression of antimicrobial therapies over time; evaluating the presence of unwanted CD20+ cell types in transplantation materials; and/or evaluating the presence of residual tumor cells after surgical excision of a tumor mass.

[0289] For example, subpopulations of patients might be ascertained using information gathered using the diagnostic variants of the CD20-binding molecules as described herein, and compositions thereof, and then individual patients could be further categorized into subpopulations based on their unique characteristic(s) revealed using those diagnostic embodiments. For example, the effectiveness of specific pharmaceuticals or therapies might be one type of criterion used to define a patient subpopulation. For example, a nontoxic diagnostic variant of a particular cytotoxic CD20-binding molecule as described herein, and/or composition thereof, may be used to differentiate which patients are in a class or subpopulation of patients predicted to respond positively to a cytotoxic variant of the same cytotoxic CD20-binding molecule or other, related, therapeutic molecule. Accordingly, associated methods for patient identification, patient stratification and diagnosis using cytotoxic CD20-binding molecules and their nontoxic or reduced-cytotoxic variants, as well as compositions thereof, are considered to be within the scope as described herein.

### IV. Variations in Proteinaceous Components of the CD20-Binding Molecules

[0290] The skilled worker will recognize that variations may be made to the CD20-binding molecules as described herein (and polynucleotides encoding them and/or their components) without diminishing their biological activities, e.g., by maintaining the overall structure and function of a given CD20-binding molecule. For example, some modifications may facilitate expression, facilitate purification, improve pharmacokinetic properties, improve protein stability, and/or improve immunogenicity. Such modifications are well known to the skilled worker and include, for example, a methionine added at the amino terminus to provide an initiation site, additional amino acids placed on either terminus to create conveniently located restriction sites or termination codons, and biochemical affinity tags fused to either terminus to provide for convenient detection and/or purification. A common modification to improve the immunogenicity of a polypeptide is to remove, after the production of the polypeptide, the starting methionine residue, which may be formulated during production in a bacterial host system, because, e.g., the presence of amino-terminal formylmethionine (fMet) might induce undesirable immune responses in chordates.

[0291] In some embodiments, the CD20-binding molecule as described herein is PEGylated, such as, e.g., to improve pharmacokinetic properties, to improve immunogenicity, and/or provide other benefit(s).

[0292] Also contemplated herein is the inclusion of additional amino acid residues at the amino and/or carboxy termini, such as sequences for epitope tags or other moieties. The additional amino acid residues may be used for various purposes including, e.g., to facilitate cloning, expression, post-translational modification, synthesis, purification, detection, and/or administration. Non-limiting examples of epitope tags and moieties are: chitin binding protein domains, enteropeptidase cleavage sites, Factor Xa cleavage sites, FIAsH tags, FLAG tags, green fluorescent proteins (GFP), glutathione-S-transferase moieties, HA tags, maltose binding protein domains, myc tags, polyhistidine tags, ReAsH tags, strep-tags, strep-tag II, TEV protease sites, thioredoxin domains, thrombin cleavage site, and V5 epitope tags.

[0293] In some embodiments, the CD20-binding molecule is a variant in which there are one or more conservative amino acid substitutions introduced into a proteinaceous region(s). As used herein, the term “conservative substitution” denotes that one or more amino acids are replaced by another, biologically similar amino acid residue. Examples include substitution of amino acid residues with similar characteristics, e.g. small amino acids, acidic amino acids, polar amino acids, basic amino acids, hydrophobic amino acids and aromatic amino acids (see, for example, Table 2 below). An example of a conservative substitution with a residue normally not found in endogenous, mammalian peptides and proteins is the conservative substitution of an arginine or lysine residue with, for example, ornithine, canavanine, aminoethylcysteine, or another basic amino acid. For further information concerning phenotypically silent substitutions in peptides and proteins see, e.g., Bowie J et al., Science 247: 1306-10 (1990).

TABLE 2
Examples of Conservative Amino Acid Substitutions

| I | II | III | IV | V | VI | VII | VIII | IX | X | XI | XII | XIII | XIV |
|---|---|---|---|---|---|---|---|---|---|---|---|---|---|
| A | D | H | C | F | N | A | C | F | A | C | A | A | D |
| G | E | K | I | W | Q | G | M | H | C | D | C | C | E |
| P | Q | R | L | Y | S | I | P | W | F | E | D | D | G |
| S | N | | M | | T | L | | Y | G | H | G | E | K |
| T | | | V | | | V | | | H | K | N | G | P |
| | | | | | | | | | I | N | P | H | Q |
| | | | | | | | | | L | Q | S | K | R |
| | | | | | | | | | M | R | T | N | S |
| | | | | | | | | | R | S | V | Q | T |
| | | | | | | | | | T | T | | R | |
| | | | | | | | | | V | | | S | |
| | | | | | | | | | W | | | P | |
| | | | | | | | | | Y | | | T | |

[0294] In the conservative substitution scheme in Table 2, illustrative conservative substitutions of amino acids are grouped by physicochemical properties—I: neutral, hydrophilic; II: acids and amides; III: basic; IV: hydrophobic; V: aromatic, bulky amino acids, VI hydrophilic uncharged, VII aliphatic uncharged, VIII non-polar uncharged, IX cycloalkenyl-associated, X hydrophobic, XI polar, XII small, XIII turn-permitting, and XIV flexible. For example, conservative amino acid substitutions include the following: 1) S may be substituted for C; 2) M or L may be substituted for F; 3) Y may be substituted for M; 4) Q or E may be substituted for K; 5) N or Q may be substituted for H; and 6) H may be substituted for N.

[0295] In some embodiments, a CD20-binding molecule as described herein or CD20-binding molecule composition as described herein may comprise a protein that has, at most, 20, 15, 10, 9, 8, 7, 6, 5, 4, 3, 2, or 1 amino acid substitution(s) compared to a protein sequence recited herein, as long as the CD20-binding molecule retains the requisite biological activity(ies).

[0296] Variants of CD20-binding molecules provided herein are within the scope as described herein as a result of changing a proteinaceous component of the CD20-binding molecule as described herein by altering one or more amino acids or deleting or inserting one or more amino acids, such as, e.g., within a CD20 binding region or Shiga toxin effector region, in order to achieve desired properties, such as, e.g., changed cytotoxicity, changed cytostatic effects, changed immunogenicity, and/or changed serum half-life. A polypeptide component of a CD20-binding molecule or CD20-binding molecule composition may further be with or without a signal sequence. In some embodiments, a proteinaceous component of a CD20-binding molecule or CD20-binding molecule composition shares at least 85%, 90%, 95%, 96%, 97%, 98%, 99% or more amino acid sequence identity to any one of the amino acid sequences of a molecule described herein, as long as the proteinaceous component retains, alone and/or as a component of a CD20-binding molecule, measurable biological activity, such as cytotoxicity, extracellular CD20 target biomolecule binding, enzymatic catalysis, or subcellular routing.

[0297] In some embodiments, a proteinaceous component of a CD20-binding molecule may comprise functional fragments or variants of a polypeptide region that have, at most, 20, 15, 10, 9, 8, 7, 6, 5, 4, 3, 2, or 1 amino acid substitution(s) compared to a polypeptide sequence described herein, as long as the substituted protein retains measurable biological activity alone and/or as a component of a CD20-binding molecule.

[0298] In some embodiments, a proteinaceous component of a CD20-binding molecule of a composition as described herein shares at least 85%, 90%, 95%, 96%, 97%, 98%, 99% or more amino acid sequence identity to any one of the amino acid sequences of a protein recited herein, as long as the protein retains measurable biological activity, such as cytotoxicity, extracellular CD20 target biomolecule binding, enzymatic catalysis, or subcellular routing. The CD20 binding regions of a CD20-binding molecule may differ from the amino acid sequences of a CD20 binding region described herein, as long as the CD20-binding region retains binding functionality to an extracellular part of CD20. Binding functionality will most likely be retained if the amino acid sequences of the CDRs or ABRs are identical. For example, a CD20-binding molecule is within the claim scope wherein the CD20-binding region comprises one or more CD20 binding regions comprising, consisting essentially of, or consisting of 85% amino acid identity to a CD20 binding region recited herein which for the purposes of determining the degree of amino acid identity, the amino acid residues that form the CDRs or ABRs are disregarded. Extracellular CD20 binding functionality can be determined by the skilled worker using standard techniques.

[0299] Also provided are variants of the CD20-binding molecules, wherein the Shiga toxin effector region differs from a naturally occurring Shiga toxin A Subunit by up to 1, 2, 3, 4, 5, 6, 7, 8, 9, 10, 15, 20, 25, 30, 35, 40 or more amino acid residues (but by no more than that which retains at least 85%, 90%, 95%, 99% or more amino acid sequence identity). Thus, a polypeptide region derived from an A Subunit of a member of the Shiga toxin family may comprise additions, deletions, truncations, or other alterations from the original sequence as long as at least 85%, 90%, 95%, 99% or more amino acid sequence identity is maintained to a naturally occurring Shiga toxin A Subunit.

[0300] Accordingly, in some embodiments, the Shiga toxin effector region comprises or consists essentially of amino acid sequences having at least 55%, 60%, 65%, 70%, 75%, 80%, 85%, 90%, 95%, 97%, 98%, 99%, 99.5% or 99.7% overall sequence identity to a naturally occurring Shiga toxin A Subunit, such as SLT-1A (SEQ ID NO:1), StxA (SEQ ID NO:2), and/or SLT-2A (SEQ ID NO:3).

[0301] Optionally, either a full-length or a truncated version of the Shiga toxin A Subunit may comprise one or more mutations (e.g. substitutions, deletions, insertions or inversions). It is preferred in some embodiments described herein that the Shiga toxin effector region has sufficient sequence identity to a naturally occurring Shiga toxin A Subunit to retain cytotoxicity after entry into a cell, either by well-known methods of host cell transformation, transfection, infection or induction, or by internalization mediated by the cell targeting CD20 binding region linked with the Shiga toxin effector region. The most critical residues for enzymatic activity and/or cytotoxicity in the Shiga toxin A Subunits have been mapped to the following residue-positions: aspargine-75, tyrosine-77, glutamate-167, arginine-170, and arginine-176 among others (Di R et al., Toxicon 57: 525-39 (2011)). In any one of the embodiments described herein, the Shiga toxin effector region may preferably but not necessarily maintain one or more conserved amino acids at positions, such as those found at positions 77, 167, 170, and 176 in StxA, SLT-1A, or the equivalent conserved position in other members of the Shiga toxin family which are typically required for cytotoxic activity. The capacity of a cytotoxic CD20-binding molecule as described herein to cause cell death, e.g. its cytotoxicity, may be measured using any one or more of a number of assays well known in the art.

[0302] In some embodiments of the CD20-binding molecules as described herein, one or more amino acid residues may be mutated, inserted, or deleted in order to increase the enzymatic activity of one or more of the molecule's Shiga toxin effector regions. For example, mutating residue-position alanine-231 in Stx1A to glutamate increased Stx1A's enzymatic activity in vitro (Suhan M, Hovde C, Infect Immun 66: 5252-9 (1998)).

[0303] In some embodiments of the CD20-binding molecules as described herein, one or more amino acid residues may be mutated or deleted in order to reduce or eliminate catalytic and/or cytotoxic activity of one or more of the molecule's Shiga toxin effector regions. The catalytic and/or cytotoxic activity of the A Subunits of members of the Shiga toxin family may be reduced or eliminated by mutation or truncation. The positions labeled tyrosine-77, glutamate-167, arginine-170, tyrosine-114, and tryptophan-203 have been shown to be important for the catalytic activity of Stx, Stx1, and Stx2. Mutating both glutamate-167 and arginine-170 eliminated the enzymatic activity of Slt-I A1 in a cell-free ribosome inactivation assay. In another approach using de novo expression of Slt-I A1 in the endoplasmic reticulum, mutating both glutamate-167 and arginine-170 or truncating it to residues 1-239 eliminated Slt-I A1 fragment cytotoxicity at that expression level.

[0304] In some embodiments, the Shiga toxin effector region(s) may be altered to change its enzymatic activity and/or cytotoxicity as long as the Shiga toxin effector region(s) retains one or more other Shiga toxin effector functions. This change may or may not result in a change in the cytotoxicity of a molecule of which the altered Shiga toxin effector region(s) is a component. Possible alterations include the following mutations to the Shiga toxin effector region(s): a truncation, deletion, inversion, insertion, rearrangement, and/or substitution.

[0305] The cytotoxicity of the A Subunits of members of the Shiga toxin family may be altered, reduced, or eliminated by mutation or truncation. The positions labeled tyrosine-77, glutamate-167, arginine-170, tyrosine-114, and tryptophan-203 have been shown to be important for the catalytic activity of Stx, Stx1, and Stx2. Mutating both glutamate-167 and arginine-170 eliminated the enzymatic activity of Slt-I A1 in a cell-free ribosome inactivation assay. In another approach using de novo expression of Slt-I A1 in the endoplasmic reticulum, mutating both glutamate-167 and arginine-170 eliminated Slt-I A1 fragment cytotoxicity at that expression level. A truncation analysis demonstrated that a fragment of StxA from residues 75 to 268 still retains significant enzymatic activity in vitro. A truncated fragment of Slt-I A1 containing residues 1-239 displayed significant enzymatic activity in vitro and cytotoxicity by de novo expression in the cytosol. Expression of a Slt-I A1 fragment truncated to residues 1-239 in the endoplasmic reticulum was not cytotoxic because the Slt-I A1 truncation could not retrotranslocate to the cytosol.

[0306] The most critical residues for enzymatic activity and/or cytotoxicity in the Shiga toxin A Subunits have been mapped to the following residue-positions: aspargine-75, tyrosine-77, glutamate-167, arginine-170, and arginine-176 among others. In particular, a double-mutant construct of Stx2A containing glutamate-E1 67-to-lysine and arginine-176-to-lysine mutations was completely inactivated; whereas, many single mutations in Stx1 and Stx2 showed a 10-fold reduction in cytotoxicity. Further, truncation of Stx1A to 1-239 or 1-240 reduced its cytotoxicity, and similarly, truncation of Stx2A to a conserved hydrophobic residue reduced its cytotoxicity.

[0307] The most critical residues for binding eukaryotic ribosomes and/or eukaryotic ribosome inhibition in the Shiga toxin A Subunit have been mapped to the following residue-positions arginine-172, arginine-176, arginine-179, arginine-188, tyrosine-189, valine-191, and leucine-233 among others.

[0308] Shiga-like toxin 1 A Subunit truncations are catalytically active, capable of enzymatically inactivating ribosomes in vitro, and cytotoxic when expressed within a cell. The smallest Shiga toxin A Subunit fragment exhibiting full enzymatic activity is a polypeptide composed of residues 1-239 of Slt1A. Although the smallest fragment of the Shiga toxin A Subunit reported to retain substantial catalytic activity was residues 75-247 of StxA, a StxA truncation expressed de novo within a eukaryotic cell requires only up to residue 240 to reach the cytosol from the endoplasmic reticulum and exert catalytic inactivation of ribosomes.

[0309] In certain CD20-binding molecules as described herein which comprise a Shiga toxin effector region derived from SLT-1A (SEQ ID NO:1) or StxA (SEQ ID NO:2), these mutational changes include substitution of the asparagine at position 75, tyrosine at position 77, tyrosine at position 114, glutamate at position 167, arginine at position 170, arginine at position 176, and/or substitution of the tryptophan at position 203. Examples of such substitutions will be known to the skilled worker based on the prior art, such as asparagine at position 75 to alanine, tyrosine at position 77 to serine, substitution of the tyrosine at position 114 to serine, substitution of the glutamate at position 167 to aspartate, substitution of the arginine at position 170 to alanine, substitution of the arginine at position 176 to lysine, and/or substitution of the tryptophan at position 203 to alanine.

[0310] In some embodiments, the CD20-binding molecule as described herein is de-immunized (see e.g., WO 2015/113005 and WO 2015/113007). In some embodiments, the de-immunized CD20-binding molecule as described herein comprises the protein shown in any one of SEQ ID NOs: 49-51, 63-64, 75-76, 81-82, 87-88, 93-94, 99-100, 105-106, 111-112, 117-118, 122-124, 131-132, 139-140, 144-145, 149-150, 155-156, 161-162, 167-168, 171, 174, 178-180, 192-193, 204-205, 210-211, 216-217, 222-223, 228-229, 234-235, 240-241, 246-247, 251-253, 260-261, 268-269, 273-274, 278-279, 284-285, 290, and 296; and optionally, the protein further comprises an amino-terminal methionine residue. In some embodiments, the CD20-binding molecule as described herein comprises or consists essentially of two proteins, each protein selected from any one of the polypeptides shown in SEQ ID NOs: 49-51, 63-64, 75-76, 81-82, 87-88, 93-94, 99-100, 105-106, 111-112, 117-118, 122-124, 131-132, 139-140, 144-145, 149-150, 155-156, 161-162, 167-168, 171, 174, 178-180, 192-193, 204-205, 210-211, 216-217, 222-223, 228-229, 234-235, 240-241, 246-247, 251-253, 260-261, 268-269, 273-274, 278-279, 284-285, 290, and 296; and optionally, each protein further comprises an amino-terminal methionine residue. In some embodiments, the protein is selected from any one of the proteins shown in SEQ ID NOs: 49-51, 63-64, 75-76, 81-82, 87-88, 93-94, 99-100, 105-106, 111-112, 117-118, 122-124, 131-132, 139-140, 144-145, 149-150, 155-156, 161-162, 167-168, 171, and 174, and further comprises a disulfide bond involving a cysteine residue at position 242, 482, 483, 484, 490, 491, 492, 493, 494, 495, 499, 500, 501, 502, 503, 504, 505, 510, 511, 512, 513, or 521.

[0311] CD20-binding molecules as described herein may optionally be conjugated to one or more additional agents, such as therapeutic and/or diagnostic agents known in the art, including such agents as described herein.

### V. Production, Manufacture, and Purification of CD20-Binding Molecules as Described Herein and Compositions Thereof

[0312] The CD20-binding molecules as described herein, and compositions thereof, may be produced using biochemical engineering techniques well known to those of skill in the art. For example, CD20-binding molecules as described herein, and compositions thereof, may be manufactured by standard synthetic methods, by use of recombinant expression systems, or by any other suitable method. The CD20-binding molecules as described herein may be produced as fusion proteins, chemically coupled conjugates, and/or combinations thereof, such as, e.g., a fusion protein component covalently linked to one or more other components of the CD20-binding molecule described herein. Thus, the CD20-binding molecules as described herein may be synthesized in a number of ways, including, e.g. methods comprising: (1) synthesizing a polypeptide or polypeptide component of a CD20-binding molecule described herein using standard solid-phase or liquid-phase methodology, either stepwise or by fragment assembly, and isolating and purifying the final proteinaceous compound product; (2) expressing a polynucleotide that encodes a polypeptide or polypeptide component of a CD20-binding molecule described herein in a host cell and recovering the expression product from the host cell or host cell culture; or (3) cell-free in vitro expression of a polynucleotide encoding a polypeptide or polypeptide component of a CD20-binding molecule described herein, and recovering the expression product; or by any combination of the methods of (1), (2) or (3) to obtain fragments of a proteinaceous component of a CD20-binding molecule described herein, subsequently joining (e.g. ligating) the fragments to obtain the proteinaceous component of a CD20-binding molecule described herein, and purifying or recovering that proteinaceous component. For example, polypeptide and/or peptide components may be ligated together using coupling reagents, such as, e.g., N,N′-dicyclohexycarbodiimide and N-ethyl-5-phenyl-isoxazolium-3′-sulfonate (Woodward's reagent K).

[0313] It may be preferable to synthesize a polypeptide or polypeptide component of a CD20-binding molecule as described herein by means of solid-phase or liquid-phase peptide synthesis. CD20-binding molecules as described herein may suitably be manufactured by standard synthetic methods. Thus, polypeptides may be synthesized by, e.g. methods comprising synthesizing the polypeptide by standard solid-phase or liquid-phase methodology, either stepwise or by fragment assembly, and isolating and purifying the final polypeptide product. In this context, reference may be made to WO 1998/11125 or, inter alia, Fields G et al., Principles and Practice of Solid-Phase Peptide Synthesis (Synthetic Peptides, Grant G, ed., Oxford University Press, U.K., 2nd ed., 2002) and the synthesis examples therein.

[0314] CD20-binding molecules as described herein may be prepared (produced and purified) using recombinant techniques well known in the art. In general, methods for preparing proteins by culturing host cells transformed or transfected with a vector comprising the encoding polynucleotide and recovering the protein from cell culture are described in, e.g. Sambrook J et al., Molecular Cloning: A Laboratory Manual (Cold Spring Harbor Laboratory Press, NY, U.S., 1989); Dieffenbach C et al., PCR Primer: A Laboratory Manual (Cold Spring Harbor Laboratory Press, N.Y., U.S., 1995). Any suitable host cell may be used to produce a proteinaceous component of a CD20-binding molecule as described herein and/or a CD20-binding protein described herein. Host cells may be cells stably or transiently transfected, transformed, transduced or infected with one or more expression vectors which drive expression of a CD20-binding protein described herein and/or a proteinaceous component of a CD20-binding molecule as described herein. In addition, a CD20-binding protein as described herein may be produced by modifying the polynucleotide encoding the CD20-binding molecule described herein, or proteinaceous component thereof, described herein that result in altering one or more amino acids or deleting or inserting one or more amino acids in order to achieve desired properties, such as changed cytotoxicity, changed cytostatic effects, changed immunogenicity, and/or changed serum half-life.

[0315] There are a wide variety of expression systems which may be chosen to produce a CD20-binding protein described herein and/or a proteinaceous component of a CD20-binding molecule as described herein. For example, host organisms for expression of a CD20-binding protein described herein and/or a proteinaceous component of a CD20-binding molecule as described herein include prokaryotes, such as E. coli and B. subtilis, eukaryotic cells, such as yeast and filamentous fungi (like S. cerevisiae, P. pastoris, A. awamori, and K. lactis), algae (like C. reinhardtii), insect cell lines, mammalian cells (like CHO cells), plant cell lines, and eukaryotic organisms such as transgenic plants (like A. thaliana and N. benthamiana).

[0316] Also provided herein are methods for producing a CD20-binding molecule according to above recited methods and using (i) a polynucleotide encoding part or all of a proteinaceous component of a CD20-binding molecule as described herein and/or a CD20-binding protein as described herein, (ii) an expression vector comprising at least one polynucleotide described herein capable of encoding part or all of a CD20-binding molecule as described herein and/or a CD20-binding protein as described herein when introduced into a suitable host cell or cell-free expression system, and/or (iii) a host cell comprising a polynucleotide or expression vector as described herein.

[0317] When a protein is expressed using recombinant techniques in a host cell or cell-free system, it is advantageous to separate (or purify) the desired protein away from other components, such as host cell factors, in order to obtain preparations that are of high purity or are substantially homogeneous. Purification can be accomplished by methods well known in the art, such as centrifugation techniques, extraction techniques, chromatographic and fractionation techniques (e.g. size separation by gel filtration, charge separation by ion-exchange column, hydrophobic interaction chromatography, reverse phase chromatography, chromatography on silica or cation-exchange resins such as diethylaminoethyl (DEAE) resins and the like, chromatofocusing, and Protein A Sepharose chromatography to remove contaminants), and precipitation techniques (e.g. ethanol precipitation or ammonium sulfate precipitation). Any number of biochemical purification techniques may be used to increase the purity of a CD20-binding molecule as described herein. In some embodiments, the CD20-binding molecules as described herein may optionally be purified in homo-multimeric forms (e.g. a protein complex of two or more identical, CD20-binding proteins) or in hetero-multimeric forms (e.g. a protein complex of two or more non-identical CD20-binding proteins).

[0318] In the Examples below are descriptions of non-limiting examples of methods for producing a CD20-binding molecule as described herein and compositions thereof, as well as specific but non-limiting aspects of production of certain, disclosed, illustrative, cytotoxic CD20-binding molecules as described herein.

### VI. CD20-Binding Molecules Immobilized on Solid Substrates

[0319] Certain embodiments as described herein include a molecule as described herein (e.g., a CD20-binding molecule or any effector fragment thereof) immobilized on a solid substrate. Solid substrates contemplated herein include, but are not limited to, microbeads, nanoparticles, polymers, matrix materials, microarrays, microtiter plates, or any solid surface known in the art (see e.g. U.S. Pat. No. 7,771,955). In accordance with these embodiments, a molecule as described herein may be covalently or non-covalently linked to a solid substrate, such as, e.g., a bead, particle, or plate, using techniques known to the skilled worker (see e.g. Jung Y et al., Analyst 133: 697-701 (2008)). Immobilized molecules described herein may be used for screening applications using techniques known in the art (see e.g. Bradbury A et al., Nat Biotechnol 29: 245-54 (2011); Sutton C, Br J Pharmacol 166: 457-75 (2012); Diamante L et al., Protein Eng Des Sel 26: 713-24 (2013); Houlihan G et al., J Immunol Methods 405: 47-56 (2014)).

[0320] Non-limiting examples of solid substrates to which a molecule as described herein may be immobilized on include: microbeads, nanoparticles, polymers, nanopolymers, nanotubes, magnetic beads, paramagnetic beads, superparamagnetic beads, streptavidin coated beads, reverse-phase magnetic beads, carboxy terminated beads, hydrazine terminated beads, silica (sodium silica) beads, iminodiacetic acid (IDA)-modified beads, aldehyde-modified beads, epoxy-activated beads, diaminodipropylamine (DADPA)-modified beads (beads with primary amine surface group), biodegradable polymeric beads, polystyrene substrates, amino-polystyrene particles, carboxyl-polystyrene particles, epoxy-polystyrene particles, dimethylamino-polystyrene particles, hydroxy-polystyrene particles, colored particles, flow cytometry particles, sulfonate-polystyrene particles, nitrocellulose surfaces, reinforced nitrocellulose membranes, nylon membranes, glass surfaces, activated glass surfaces, activated quartz surfaces, polyvinylidene difluoride (PVDF) membranes, polyacrylamide-based substrates, poly-vinyl chloride substrates, poly-methyl methacrylate substrates, poly(dimethyl siloxane) substrates, and photopolymers which contain photoreactive species (such as, e.g., nitrenes, carbenes, and ketyl radicals) capable of forming covalent linkages. Other examples of solid substrates to which a molecule as described herein may be immobilized on are commonly used in molecular display systems, such as, e.g., cellular surfaces, phages, and virus particles.

### VII. Pharmaceutical and Diagnostic Compositions Comprising a CD20-Binding Molecule

[0321] Described herein are CD20-binding molecules for use, alone or in combination with one or more additional therapeutic agents, in a pharmaceutical composition, for treatment or prophylaxis of conditions, diseases, disorders, or symptoms described in further detail below (e.g., cancers, malignant tumors, non-malignant tumors, growth abnormalities, and immune disorders). Also provided herein are pharmaceutical compositions comprising a CD20-binding molecule, or a pharmaceutically acceptable salt or solvate thereof, together with at least one pharmaceutically acceptable carrier, excipient, or vehicle. In some embodiments, the pharmaceutical composition as described herein may comprise CD20-binding molecules that are homo-multimeric and/or hetero-multimeric. The pharmaceutical compositions as described herein are useful in methods of treating, ameliorating, or preventing a disease, condition, disorder, or symptom described in further detail below. Each such disease, condition, disorder, or symptom is envisioned to be a separate embodiment with respect to uses of a pharmaceutical composition as described herein. Also provided are pharmaceutical compositions for use in at least one method of treatment, as described in more detail below.

[0322] As used herein, the terms “patient” and “subject” are used interchangeably to refer to any organism, commonly vertebrates such as humans and animals, which presents symptoms, signs, and/or indications of at least one disease, disorder, or condition. These terms include mammals such as the non-limiting examples of primates, livestock animals (e.g. cattle, horses, pigs, sheep, goats, etc.), companion animals (e.g. cats, dogs, etc.) and laboratory animals (e.g. mice, rabbits, rats, etc.).

[0323] As used herein, “treat,” “treating,” or “treatment” and grammatical variants thereof refer to an approach for obtaining beneficial or desired clinical results. The terms may refer to slowing the onset or rate of development of a condition, disorder or disease, reducing or alleviating symptoms associated with it, generating a complete or partial regression of the condition, or some combination of any of the above. Beneficial or desired clinical results may include, but are not limited to, reduction or alleviation of symptoms, diminishment of extent of disease, stabilization (e.g. not worsening) of state of disease, delay or slowing of disease progression, amelioration or palliation of the disease state, and remission (whether partial or total), whether detectable or undetectable. “Treat,” “treating,” or “treatment” can also mean prolonging survival relative to expected survival time if not receiving treatment. A subject (e.g. a human) in need of treatment may thus be a subject already afflicted with the disease or disorder in question. The terms “treat,” “treating,” or “treatment” includes inhibition or reduction of an increase in severity of a pathological state or symptoms relative to the absence of treatment, and is not necessarily meant to imply complete cessation of the relevant disease, disorder, or condition. With regard to tumors and/or cancers, treatment includes reductions in overall tumor burden and/or individual tumor size.

[0324] As used herein, the terms “prevent,” “preventing,” “prevention” and grammatical variants thereof refer to an approach for preventing the development of, or altering the pathology of, a condition, disease, or disorder. Accordingly, “prevention” may refer to prophylactic or preventive measures. Beneficial or desired clinical results may include, but are not limited to, prevention or slowing of symptoms, progression or development of a disease, whether detectable or undetectable. A subject (e.g. a human) in need of prevention may thus be a subject not yet afflicted with the disease or disorder in question. The term “prevention” includes slowing the onset of disease relative to the absence of treatment, and is not necessarily meant to imply permanent prevention of the relevant disease, disorder or condition. Thus “preventing” or “prevention” of a condition may in certain contexts refer to reducing the risk of developing the condition, or preventing or delaying the development of symptoms associated with the condition.

[0325] As used herein, an “effective amount” or “therapeutically effective amount” is an amount or dose of a composition (e.g. a therapeutic composition, compound, or agent) that produces at least one desired therapeutic effect in a subject, such as preventing or treating a target condition or beneficially alleviating a symptom associated with the condition. The most desirable therapeutically effective amount is an amount that will produce a desired efficacy of a particular treatment selected by one of skill in the art for a given subject in need thereof. This amount will vary depending upon a variety of factors understood by the skilled worker, including but not limited to the characteristics of the therapeutic composition (including activity, pharmacokinetics, pharmacodynamics, and bioavailability), the physiological condition of the subject (including age, sex, disease type, disease stage, general physical condition, responsiveness to a given dosage, and type of medication), the nature of the pharmaceutically acceptable carrier or carriers in the formulation, and the route of administration. One skilled in the clinical and pharmacological arts will be able to determine a therapeutically effective amount through routine experimentation, namely by monitoring a subject's response to administration of a composition and adjusting the dosage accordingly (see e.g. Remington: The Science and Practice of Pharmacy (Gennaro A, ed., Mack Publishing Co., Easton, Pa., U.S., 19th ed., 1995)).

Production or Manufacture of a Pharmaceutical and/or Diagnostic Composition Comprising a CD20-Binding Molecule as Described Herein and/or a Composition Thereof

[0326] Pharmaceutically acceptable salts or solvates of any of the CD20-binding molecules as described herein are within the scope as described herein.

[0327] The term “solvate” in the context as described herein refers to a complex of defined stoichiometry formed between a solute (e.g. in casu, a proteinaceous compound or pharmaceutically acceptable salt thereof) and a solvent. The solvent in this connection may, for example, be water, ethanol or another pharmaceutically acceptable, typically small-molecular organic species, such as, but not limited to, acetic acid or lactic acid. When the solvent in question is water, such a solvate is normally referred to as a hydrate.

[0328] CD20-binding molecules as described herein, or salts thereof, may be formulated as pharmaceutical compositions prepared for storage or administration, which typically comprise a therapeutically effective amount of a molecule or composition as described herein, or a salt thereof, in a pharmaceutically acceptable carrier. The term “pharmaceutically acceptable carrier” includes any of the standard pharmaceutical carriers. Pharmaceutically acceptable carriers for therapeutic use are well known in the pharmaceutical art, and are described, for example, in Remington's Pharmaceutical Sciences (Mack Publishing Co. (A. Gennaro, ed., 1985)). As used herein, “pharmaceutically acceptable carrier” includes any and all physiologically acceptable, i.e. compatible, solvents, dispersion media, coatings, antimicrobial agents, isotonic, and absorption delaying agents, and the like. Pharmaceutically acceptable carriers or diluents include those used in formulations suitable for oral, rectal, nasal or parenteral (including subcutaneous, intramuscular, intravenous, intradermal, and transdermal) administration. Illustrative pharmaceutically acceptable carriers include sterile aqueous solutions or dispersions and sterile powders for the extemporaneous preparation of sterile injectable solutions or dispersions. Examples of suitable aqueous and nonaqueous carriers that may be employed in the pharmaceutical compositions described herein include water, ethanol, polyols (such as glycerol, propylene glycol, polyethylene glycol, and the like), and suitable mixtures thereof, vegetable oils, such as olive oil, and injectable organic esters, such as ethyloleate. Proper fluidity can be maintained, for example, by the use of coating materials, such as lecithin, by the maintenance of the required particle size in the case of dispersions, and by the use of surfactants. In some embodiments, the carrier is suitable for intravenous, intramuscular, subcutaneous, parenteral, spinal or epidermal administration (e.g. by injection or infusion). Depending on selected route of administration, the CD20-binding molecule as described herein or other pharmaceutical component may be coated in a material intended to protect the CD20-binding molecule and/or a compound thereof from the action of low pH and other natural inactivating conditions to which the active CD20-binding molecule described herein may encounter when administered to a patient by a particular route of administration.

[0329] The pharmaceutical compositions as described herein may also contain adjuvants such as preservatives, wetting agents, emulsifying agents and dispersing agents. Preventing the presence of microorganisms may be ensured both by sterilization procedures, and by the inclusion of various antibacterial and antifungal agents, for example, paraben, chlorobutanol, phenol sorbic acid, and the like. Isotonic agents, such as sugars, sodium chloride, and the like into the compositions, may also be desirable. In addition, prolonged absorption of the injectable pharmaceutical form may be brought about by the inclusion of agents which delay absorption such as, aluminum monostearate and gelatin.

[0330] A pharmaceutical composition as described herein also optionally includes a pharmaceutically acceptable antioxidant. Illustrative pharmaceutically acceptable antioxidants are water soluble antioxidants such as ascorbic acid, cysteine hydrochloride, sodium bisulfate, sodium metabisulfite, sodium sulfite and the like; oil-soluble antioxidants, such as ascorbyl palmitate, butylated hydroxyanisole (BHA), butylated hydroxytoluene (BHT), lecithin, propylgallate, alpha-tocopherol, and the like; and metal chelating agents, such as citric acid, ethylenediamine tetraacetic acid (EDTA), sorbitol, tartaric acid, phosphoric acid, and the like.

[0331] Also provided herein are pharmaceutical compositions comprising one or a combination of different CD20-binding molecules as described herein, or an ester, salt or amide of any of the foregoing, and at least one pharmaceutically acceptable carrier.

[0332] A pharmaceutical composition as described herein optionally includes a pharmaceutically acceptable excipient. Non-limiting examples of pharmaceutically acceptable excipients include arginine, arginine sulfate, citric acid, glycerol, hydrochloric acid, mannitol, methionine, polysorbate, sodium chloride, sodium citrate, sodium hydroxide, sorbitol, sucrose, trehalose, and/or water. In some embodiments, the pharmaceutical composition as described herein comprises an aqueous carrier and at least one pharmaceutically acceptable excipient. In certain other embodiments, the pharmaceutical composition as described herein comprises a salt and/or powder, such as, e.g. a freeze-dried, lyophilized, dehydrated, and/or cryodesiccated composition comprising at least one pharmaceutically acceptable excipient. In some embodiments of the pharmaceutical composition as described herein, the excipient functions to reduce and/or limit the immunogenicity and/or immunogenic potential of the CD20-binding molecule, such as, e.g. after administration and/or repeated administration to a mammal.

[0333] The pharmaceutical compositions as described herein may comprise one or more adjuvants such as a buffer, tonicity-adjusting agent (isotonic agent), antioxidant, surfactant, stabilizer, preservative, emulsifying agent, cryoprotective agent, wetting agent, and/or dispersing agent or other additives well known to those of skill in the art, such as, e.g. a binding agent. In some embodiments, the pharmaceutical composition as described herein comprises an aqueous carrier and a pharmaceutically acceptable adjuvant or other additive. In certain other embodiments, the pharmaceutical composition as described herein comprises a salt and/or powder, such as, e.g. a freeze-dried, lyophilized, dehydrated, and/or cryodesiccated composition comprising a pharmaceutically acceptable adjuvant or other additive. Non-limiting examples of pharmaceutically suitable stabilizers include human albumin and polysorbates such as, e.g., polyoxyethylene (20) sorbitan monolaurate (polysorbate 20), polyoxyethylene (20) sorbitan monopalmitate (polysorbate 40), polyoxyethylene (20) sorbitan monostearate (polysorbate 60), and (polyoxyethylene (20) sorbitan monooleate (polysorbate 80).

[0334] The pharmaceutical composition as described herein may comprise one or more pharmaceutically acceptable buffers. Non-limiting examples of suitable buffers include acetate, citrate, citric acid, histidine, phosphate, sodium citrate, and succinate buffers. In some embodiments, the pharmaceutical composition as described herein comprises an aqueous carrier comprising a pharmaceutically acceptable buffer. In some embodiments, the pharmaceutical composition as described herein comprises a salt and/or powder, such as, e.g. a freeze-dried, lyophilized, dehydrated, and/or cryodesiccated composition comprising a pharmaceutically acceptable buffer.

[0335] The pharmaceutical composition as described herein may comprise one or more pharmaceutically acceptable isotonic agents or tonicity-adjusting agents. Non-limiting examples of suitable isotonic agents include sugars (e.g. dextrose), sugar alcohols, sodium chloride, and the like. Further examples of suitable sugars include disaccharides like sucrose and trehalose. Illustrative, pharmaceutically acceptable sugar alcohols include glycerol, mannitol, and sorbitol. In some embodiments, the pharmaceutical composition as described herein comprises an aqueous carrier and a pharmaceutically acceptable isotonic agent. In some embodiments, the pharmaceutical composition as described herein comprises a salt and/or powder, such as, e.g. a freeze-dried, lyophilized, dehydrated, and/or cryodesiccated composition comprising a pharmaceutically acceptable isotonic agent.

[0336] The pharmaceutical compositions as described herein may comprise one or more pharmaceutically acceptable antioxidants. Illustrative pharmaceutically acceptable antioxidants include water soluble antioxidants, such as, e.g., ascorbic acid, cysteine hydrochloride, methionine, sodium bisulfate, sodium metabisulfite, sodium sulfite and the like; oil-soluble antioxidants, such as, e.g., ascorbyl palmitate, butylated hydroxyanisole (BHA), butylated hydroxytoluene (BHT), lecithin, propylgallate, alpha-tocopherol, and the like; and metal-chelating agents, such as, e.g., citric acid, ethylenediamine tetraacetic acid (EDTA), sorbitol, tartaric acid, phosphoric acid, and the like. In some embodiments, the pharmaceutical composition as described herein comprises an aqueous carrier and a pharmaceutically acceptable antioxidant. In certain other embodiments, the pharmaceutical composition as described herein comprises a salt and/or powder, such as, e.g. a freeze-dried, lyophilized, dehydrated, and/or cryodesiccated composition comprising a pharmaceutically acceptable antioxidant.

[0337] A pharmaceutical composition as described herein may comprise one or more pharmaceutically acceptable surfactants and/or emulsifying agents (emulsifiers). Non-limiting examples of suitable surfactants and/or emulsifiers include polysorbates such as, e.g., polyoxyethylene (20) sorbitan monolaurate (polysorbate 20), polyoxyethylene (20) sorbitan monopalmitate (polysorbate 40), polyoxyethylene (20) sorbitan monostearate (polysorbate 60), and (polyoxyethylene (20) sorbitan monooleate (polysorbate 80). In some embodiments, the pharmaceutical composition as described herein comprises an aqueous carrier and a pharmaceutically acceptable surfactant and/or emulsifier. In some embodiments, the pharmaceutical composition as described herein comprises a salt and/or powder, such as, e.g. a freeze-dried, lyophilized, dehydrated, and/or cryodesiccated composition comprising a pharmaceutically acceptable surfactant and/or emulsifier. One or more surfactants and/or emulsifying agents may also be desirable in a pharmaceutical composition as described herein to help prevent aggregation of the cell-targeting molecule as described herein. The pharmaceutical compositions as described herein may comprise one or more pharmaceutically acceptable preservative agents. For example, preventing the presence of microorganisms may be ensured both by sterilization procedures, and by the inclusion of various antibacterial and antifungal agents, such as, e.g., paraben, chlorobutanol, phenol sorbic acid, and the like in the compositions as described herein.

[0338] A pharmaceutical composition as described herein may comprise one or more pharmaceutically acceptable cryoprotective agents, also referred to as cryoprotectants or cryogenic protectants. Non-limiting examples of suitable cryoprotectants include ethylene glycol, glycerol, sorbitol, sucrose, and trehalose. In some embodiments, the pharmaceutical composition as described herein comprises an aqueous carrier and a pharmaceutically acceptable cryoprotectant. In certain other embodiments, the pharmaceutical composition as described herein comprises a salt and/or powder, such as, e.g. a freeze-dried, lyophilized, dehydrated, and/or cryodesiccated composition comprising a pharmaceutically acceptable cryoprotectant.

[0339] In addition, prolonged absorption of the injectable pharmaceutical form may be brought about by the inclusion of agents which delay absorption such as, e.g., a monostearate salt, aluminum monostearate, and/or gelatin.

[0340] Also provided herein are pharmaceutical compositions comprising one or a combination of different polypeptides and/or cell-targeting molecules described herein, or an ester, salt or amide of any of the foregoing, and at least one pharmaceutically acceptable carrier.

[0341] The pH of the pharmaceutical composition as described herein can be adjusted with acids or bases, such as hydrochloric acid or sodium hydroxide, or buffers with acetate, citrate, citric acid, histidine, sodium citrate, succinate, phosphate, and the like. Non-limiting examples of pharmaceutically acceptable solvents or carriers for use in a pharmaceutical composition as described herein include aqueous solutions comprising a cell-targeting molecule as described herein and a buffer such as, e.g., citrate, histidine, phosphate, or succinate adjusted to pH 5.0, 6.0, 7.0, or 4.0, respectively. Certain embodiments as described herein include compositions comprising one of the aforementioned solvents and/or carriers as described herein.

[0342] Pharmaceutical compositions as described herein that are solutions or suspensions used for intradermal or subcutaneous application typically include one or more of: a sterile diluent such as water for injection, saline solution, fixed oils, polyethylene glycols, glycerine, propylene glycol or other synthetic solvents; antibacterial agents such as benzyl alcohol or methyl parabens; antioxidants such as ascorbic acid, cysteine hydrochloride, methionine, sodium bisulfate, sodium metabisulfite, and sodium sulfite; chelating agents such as citric acid, ethylenediaminetetraacetic acid, sorbitol, tartaric acid, and phosphoric acid; surfactants such as a polysorbate; buffers such as acetate, citrate, histidine, and phosphate buffers; and tonicity adjusting agents such as, e.g., dextrose, glycerol, mannitol, sodium chloride, sorbitol, sucrose, and trehalose. Such preparations may be enclosed in ampoules, disposable syringes or multiple dose vials made of a glass or plastic.

[0343] Sterile injectable solutions may be prepared by incorporating a protein or cell-targeting molecule as described herein in the required amount in an appropriate solvent with one or a combination of ingredients described above, as required, followed by sterilization microfiltration. Dispersions may be prepared by incorporating the active compound into a sterile vehicle that contains a dispersion medium and other ingredients, such as those described above. In the case of sterile powders for the preparation of sterile injectable solutions, the methods of preparation are vacuum drying and freeze-drying (lyophilization) that yield a powder of the active ingredient in addition to any additional desired ingredient from a sterile-filtered solution thereof. In some embodiments, the pharmaceutical composition as described herein comprises a powder comprising sorbitol, trehalose, sodium citrate, and polysorbate-20, and optionally, further comprises glycerol and/or methionine. In some embodiments, the pharmaceutical composition as described herein comprises sodium citrate, trehalose, and polysorbate-20, and optionally, further comprises glycerol and/or methionine.

[0344] In some embodiments, the pharmaceutical composition as described herein comprises sorbitol, sodium citrate, and polysorbate-20, and optionally, further comprises albumin, glycerol, and/or methionine. In some embodiments, the pharmaceutical composition as described herein comprises sorbitol, histidine, and polysorbate-20, and optionally, further comprises albumin, glycerol, and/or methionine.

[0345] In some embodiments, the pharmaceutical compositions comprise a CD20-binding molecule, wherein the pharmaceutical composition comprises at least one pharmaceutically acceptable excipient or carrier. In some embodiments, the pharmaceutical composition comprises sorbitol, sodium citrate and polysorbate-20. In some embodiments, the pharmaceutical composition comprises about 5 to about 500 mM sorbitol; about 1 to about 50 mM sodium citrate, and/or about 0.01 to about 1% polysorbate 20. In some embodiments, the pH of the pharmaceutical compositions is about 4.5 to about 7.5, such as about 4.5, about 5.0, about 5.5, about 6.0, about 6.5, about 7.0 or about 7.5. In some embodiments, the pharmaceutical composition comprises 200 mM sorbitol, 20 mM sodium citrate and 0.1% (v/v) polysorbate-20; and wherein the pharmaceutical composition has a pH of about 5.5. In some embodiments, the pharmaceutical composition comprises a CD20-binding molecule comprising the sequence of SEQ ID NO: 54, wherein the pharmaceutical compositions comprises 200 mM sorbitol, 20 mM sodium citrate and 0.1% (v/v) polysorbate-20; and wherein the pharmaceutical composition has a pH of about 5.5.

[0346] In some embodiments, the pharmaceutical composition is provided as a concentrated solution, which is diluted before administration to a subject. The pharmaceutical composition may be diluted using standard diluents commonly used in the art, such as saline or water. In some embodiments, the concentrated form of the pharmaceutical composition comprises about 5 to about 500 mM sorbitol; about 1 to about 50 mM sodium citrate, and/or about 0.01 to about 1% polysorbate 20. In some embodiments, the concentrated form of the pharmaceutical composition comprises 200 mM sorbitol, 20 mM sodium citrate and 0.1% (v/v) polysorbate-20. In some embodiments, the concentrated form of the pharmaceutical composition comprises a CD20-binding molecule comprising the sequence of SEQ ID NO: 54, wherein the pharmaceutical compositions comprises 200 mM sorbitol, 20 mM sodium citrate and 0.1% (v/v) polysorbate-20; and wherein the pharmaceutical composition has a pH of about 5.5. In some embodiments, the concentrated form of the pharmaceutical composition is diluted 2-fold, 5-fold, 10-fold, 20-fold, 25-fold, 50-fold, 100-fold, 250-fold, 500-fold, 1,000-fold, 1,500-fold, 2,000-fold, 5,000-fold, 10,000-fold, or more before use.

[0347] In some embodiments, the diluted form of the pharmaceutical composition is administered to a subject. In some embodiments, the diluted form of the pharmaceutical composition comprises about 5 to about 500 mM sorbitol; about 1 to about 50 mM sodium citrate, and/or about 0.01 to about 1% polysorbate 20. In some embodiments, the diluted form of the pharmaceutical composition comprises 200 mM sorbitol, 20 mM sodium citrate and 0.1% (v/v) polysorbate-20. In some embodiments, the diluted form of the pharmaceutical composition comprises a CD20-binding molecule comprising the sequence of SEQ ID NO: 54, wherein the pharmaceutical compositions comprises 200 mM sorbitol, 20 mM sodium citrate and 0.1% (v/v) polysorbate-20; and wherein the pharmaceutical composition has a pH of about 5.5.

[0348] The formulations of the pharmaceutical compositions as described herein may conveniently be presented in unit dosage form and may be prepared by any of the methods well known in the art of pharmacy. In such form, the composition is divided into unit doses containing appropriate quantities of the active component. The unit dosage form can be a packaged preparation, the package containing discrete quantities of the preparations, for example, packeted tablets, capsules, and powders in vials or ampoules. The unit dosage form can also be a capsule, cachet, or tablet itself, or it can be the appropriate number of any of these packaged forms. It may be provided in single dose injectable form, for example in the form of a pen. Compositions may be formulated for any suitable route and means of administration. Subcutaneous or transdermal modes of administration may be particularly suitable for pharmaceutical compositions and therapeutic molecules described herein.

[0349] Therapeutic compositions are typically sterile and stable under the conditions of manufacture and storage. The composition may be formulated as a solution, microemulsion, liposome, or other ordered structure suitable to high drug concentration. The carrier may be a solvent or dispersion medium containing, for example, water, alcohol such as ethanol, polyol (e.g. glycerol, propylene glycol, and liquid polyethylene glycol), or any suitable mixtures. The proper fluidity may be maintained, for example, by the use of a coating such as lecithin, by the maintenance of the required particle size in the case of dispersion and by use of surfactants according to formulation chemistry well known in the art. In some embodiments, isotonic agents, e.g. sugars, polyalcohols such as mannitol, sorbitol, or sodium chloride may be desirable in the composition. Prolonged absorption of injectable compositions may be brought about by including in the composition an agent that delays absorption for example, monostearate salts and gelatin.

[0350] Solutions or suspensions used for intradermal or subcutaneous application typically include one or more of: a sterile diluent such as water for injection, saline solution, fixed oils, polyethylene glycols, glycerine, propylene glycol or other synthetic solvents; antibacterial agents such as benzyl alcohol or methyl parabens; antioxidants such as ascorbic acid or sodium bisulfite; chelating agents such as ethylenediaminetetraacetic acid; buffers such as acetates, citrates or phosphates; and tonicity adjusting agents such as, e.g., sodium chloride or dextrose. The pH can be adjusted with acids or bases, such as hydrochloric acid or sodium hydroxide, or buffers with citrate, phosphate, acetate and the like. Such preparations may be enclosed in ampoules, disposable syringes or multiple dose vials made of glass or plastic.

[0351] Sterile injectable solutions may be prepared by incorporating a CD20-binding molecule as described herein in the required amount in an appropriate solvent with one or a combination of ingredients described above, as required, followed by sterilization microfiltration. Dispersions may be prepared by incorporating the active compound into a sterile vehicle that contains a dispersion medium and other ingredients, such as those described above. In the case of sterile powders for the preparation of sterile injectable solutions, the methods of preparation are vacuum drying and freeze-drying (lyophilization) that yield a powder of the active ingredient in addition to any additional desired ingredient from a sterile-filtered solution thereof.

[0352] When a therapeutically effective amount of a CD20-binding molecule as described herein is designed to be administered by, e.g. intravenous, cutaneous or subcutaneous injection, the binding agent will be in the form of a pyrogen-free, parenterally acceptable aqueous solution. Methods for preparing parenterally acceptable protein solutions, taking into consideration appropriate pH, isotonicity, stability, and the like, are within the skill in the art. A preferred pharmaceutical composition for intravenous, cutaneous, or subcutaneous injection will contain, in addition to binding agents, an isotonic vehicle such as sodium chloride injection, Ringer's injection, dextrose injection, dextrose and sodium chloride injection, lactated Ringer's injection, or other vehicle as known in the art. A pharmaceutical composition as described herein may also contain stabilizers, preservatives, buffers, antioxidants, or other additives well known to those of skill in the art.

[0353] As described elsewhere herein, a CD20-binding molecule as described herein or composition thereof (e.g. pharmaceutical or diagnostic composition) may be prepared with carriers that will protect the CD20-binding molecule described herein against rapid release, such as a controlled release formulation, including implants, transdermal patches, and microencapsulated delivery systems. Biodegradable, biocompatible polymers can be used, such as ethylene vinyl acetate, polyanhydrides, polyglycolic acid, collagen, polyorthoesters, and polylactic acid. Many methods for the preparation of such formulations are patented or generally known to those skilled in the art (see e.g. Sustained and Controlled Release Drug Delivery Systems (Robinson J, ed., Marcel Dekker, Inc., NY, U.S., 1978).

[0354] In some embodiments, the composition as described herein (e.g. pharmaceutical or diagnostic compositions) may be formulated to ensure a desired distribution in vivo. For example, the blood-brain barrier excludes many large and/or hydrophilic compounds. To target a therapeutic molecule or composition as described herein to a particular in vivo location, it can be formulated, for example, in liposomes which may comprise one or more moieties that are selectively transported into specific cells or organs, thus enhancing targeted drug delivery. Illustrative targeting moieties include folate or biotin; mannosides; antibodies; surfactant protein A receptor; p120 catenin and the like.

[0355] Pharmaceutical compositions include parenteral formulations designed to be used as implants or particulate systems. Examples of implants are depot formulations composed of polymeric or hydrophobic components such as emulsions, ion exchange resins, and soluble salt solutions. Examples of particulate systems are microspheres, microparticles, nanocapsules, nanospheres, and nanoparticles. Controlled release formulations may be prepared using polymers sensitive to ions, such as, e.g. liposomes, polaxamer 407, and hydroxyapatite.

[0356] Pharmaceutical compositions as described herein may be produced using techniques known in the art such that the produced compositions comprise emulsions, liposomes, niosomes, polymeric nanoparticles, and/or solid lipid nanoparticles (SLNs) (see e.g. Lakshmi P et al., Venereal Leprol 73: 157-161 (2007); A Revolution in Dosage Form Design and Development, Recent Advances in Novel Drug Carrier Systems (Sezer A, ed., InTech, 2012)).

### VIII. Polynucleotides, Expression Vectors, and Host Cells Described Herein

[0357] Beyond the CD20-binding molecules as described herein and compositions thereof, the polynucleotides that encode such CD20-binding molecules, the proteinaceous components of such CD20-binding molecules, or functional portions thereof, are also encompassed within the scope as described herein. The term “polynucleotide” is equivalent to the term “nucleic acids,” each of which includes one or more of: polymers of deoxyribonucleic acids (DNAs), polymers of ribonucleic acids (RNAs), analogs of these DNAs or RNAs generated using nucleotide analogs, and derivatives, fragments and homologs thereof. The polynucleotide described herein may be single-, double-, or triple-stranded. Such polynucleotides are specifically disclosed to include all polynucleotides capable of encoding an illustrative protein, for example, taking into account the wobble known to be tolerated in the third position of RNA codons, yet encoding for the same amino acid as a different RNA codon (see Stothard P, Biotechniques 28: 1102-4 (2000)).

[0358] Also provided herein are polynucleotides which encode a CD20-binding molecule (e.g. a CD20-binding protein as described herein), or a component, fragment or derivative thereof. The polynucleotides may include, e.g., a nucleic acid sequence encoding a polypeptide at least 50%, 55%, 60%, 65%, 70%, 75%, 80%, 85%, 90%, 95%, 99% or more, identical to a polypeptide comprising one of the amino acid sequences of all or part of a CD20-binding molecule as described herein. Also described herein are polynucleotides comprising nucleotide sequences that hybridize under stringent conditions to a polynucleotide which encodes all or part of a CD20-binding molecule as described herein, or a fragment or derivative thereof, or the antisense or complement of any such sequence.

[0359] Derivatives or analogs of the polynucleotides (or CD20-binding proteins) described herein include, inter alia, polynucleotide (or polypeptide) molecules having regions that are substantially homologous to the polynucleotides or CD20-binding proteins described herein, e.g. by at least about 45%, 50%, 70%, 80%, 95%, 98%, or even 99% identity (with a preferred identity of 80-99%) over a polynucleotide or polypeptide sequence of the same size or when compared to an aligned sequence in which the alignment is done by a computer homology program known in the art. An illustrative program is the GAP program (Wisconsin Sequence Analysis Package, Version 8 for UNIX, Genetics Computer Group, University Research Park, Madison, Wis., U.S.) using the default settings, which uses the algorithm of Smith T, Waterman M, Adv Appl Math 2: 482-9 (1981). Also included are polynucleotides capable of hybridizing to the complement of a sequence encoding the CD20-binding proteins described herein under stringent conditions (see e.g. Ausubel F et al., Current Protocols in Molecular Biology (John Wiley & Sons, New York, N.Y., U.S., 1993)), and below. Stringent conditions are known to those skilled in the art and may be found, e.g., in Current Protocols in Molecular Biology (John Wiley & Sons, NY, U.S., Ch. Sec. 6.3.1-6.3.6 (1989)).

[0360] Also described are expression vectors that comprise the polynucleotides within the scope as described herein. The polynucleotides capable of encoding the CD20-binding proteins described herein may be inserted into known vectors, including bacterial plasmids, viral vectors and phage vectors, using material and methods well known in the art to produce expression vectors. Such expression vectors will include the polynucleotides necessary to support production of contemplated CD20-binding proteins described herein within any host cell of choice or cell-free expression systems (e.g., pTxb1 and pIVEX2.3). The specific polynucleotides comprising expression vectors for use with specific types of host cells or cell-free expression systems are well known to one of ordinary skill in the art, can be determined using routine experimentation, or may be purchased.

[0361] The term “expression vector,” as used herein, refers to a polynucleotide, linear or circular, comprising one or more expression units. The term “expression unit” denotes a polynucleotide segment encoding a polypeptide of interest and capable of providing expression of the nucleic acid segment in a host cell. An expression unit typically comprises a transcription promoter, an open reading frame encoding the polypeptide of interest, and a transcription terminator, all in operable configuration. An expression vector contains one or more expression units. Thus, in the context as described herein, an expression vector encoding a protein comprising a single polypeptide chain (e.g. a scFv genetically recombined with a Shiga toxin effector region) includes at least an expression unit for the single polypeptide chain, whereas a protein comprising, e.g. two or more polypeptide chains (e.g. one chain comprising a V_{L} domain and a second chain comprising a V_{H} domain linked to a toxin effector region) includes at least two expression units, one for each of the two polypeptide chains of the protein. For expression of multi-chain proteins described herein, an expression unit for each polypeptide chain may also be separately contained on different expression vectors (e.g. expression may be achieved with a single host cell into which expression vectors for each polypeptide chain has been introduced).

[0362] Expression vectors capable of directing transient or stable expression of polypeptides and proteins are well known in the art. The expression vectors generally include, but are not limited to, one or more of the following: a heterologous signal sequence or peptide, an origin of replication, one or more marker genes, an enhancer element, a promoter, and a transcription termination sequence, each of which is well known in the art. Optional regulatory control sequences, integration sequences, and useful markers that can be employed are known in the art.

[0363] The term “host cell” refers to a cell which can support the replication or expression of the expression vector. Host cells may be prokaryotic cells, such as E. coli or eukaryotic cells (e.g. yeast, insect, amphibian, bird, or mammalian cells). Creation and isolation of host cell lines comprising a polynucleotide described herein or capable of producing a CD20-binding protein described herein may be accomplished using standard techniques known in the art.

[0364] Molecules and compositions within the scope as described herein may comprise variants or derivatives of the CD20-binding molecules described herein that are produced by modifying the polynucleotide encoding a proteinaceous component of a CD20-binding molecule described herein and/or a CD20-binding protein described herein by altering one or more amino acids or deleting or inserting one or more amino acids that may render it more suitable to achieve desired properties, such as more optimal expression by a host cell.

### IX. Delivery Devices and Kits

[0365] In some embodiments, provided herein are a device comprising one or more compositions of matter as described herein, such as, e.g., a pharmaceutical composition, for delivery to a subject in need thereof. Thus, among certain embodiments as described herein are kits comprising a composition of matter as described herein, and optionally, instructions for use, additional reagent(s), and/or pharmaceutical delivery device(s). A delivery device comprising one or more proteinaceous compositions as described herein (e.g. a CD20-binding molecule as described herein) may be used to administer to a patient a composition of matter described herein by various delivery methods, including: intravenous, subcutaneous, intramuscular or intraperitoneal injection; oral administration; transdermal administration; pulmonary or transmucosal administration; administration by implant, osmotic pump, cartridge or micro pump; or by other means recognized by a person of skill in the art.

[0366] Kits may be useful for drug administration and/or diagnostic information gathering. A kit described herein may optionally comprise at least one additional reagent (e.g. standards, markers and the like). Kits typically include a label indicating the intended use of the contents of the kit. The kit may further comprise reagents and other tools for detecting a cell type (e.g. a tumor cell) in a sample or in a subject, or for diagnosing whether a patient belongs to a group that responds to a therapeutic strategy which makes use of a CD20-binding molecule, composition, or related method as described herein as described herein.

### X. Illustrative Methods for Using the Compositions Described Herein

[0367] Generally, it is an object of this disclosure to provide pharmacologically active agents, as well as compositions comprising the same, that can be used in the prevention and/or treatment of diseases, disorders, and conditions, such as certain cancers, tumors, growth abnormalities, immune disorders, or further pathological conditions mentioned herein. Accordingly, provided herein are methods of using the CD20-binding molecules of the present, solvates as described herein, salts as described herein, and compositions of any of the aforementioned, such as pharmaceutical compositions described herein, for the targeted killing of CD20 expressing cells, for delivering additional exogenous materials into certain CD20 expressing cells, for labeling of the interiors of certain CD20 expressing cells, for collecting diagnostic information, and for treating various diseases, disorders, and conditions as described herein.

[0368] In particular, it is an object described herein to provide such pharmacologically active agents, compositions, and/or methods that have certain advantages compared to the agents, compositions, and/or methods that are currently known in the art. Accordingly, provided herein are methods of using CD20-binding molecules, and compositions thereof, characterized by specified proteinaceous components. For example, any of the molecules shown in SEQ ID NOs: 1-304 may be specifically utilized as a component of the CD20-binding molecule or composition used in the following methods.

[0369] Additionally, provided herein is a method of rapidly inducing cellular internalization of a CD20-binding molecule into a CD20 expressing cell(s), the method comprising the step of contacting the cell(s) with a CD20-binding molecule as described herein or a pharmaceutical composition thereof. Similarly, provided herein is a method of internalizing a cell surface localized CD20 bound by a CD20-binding molecule in a patient, the method comprising the step of administering to the patient a CD20-binding molecule or pharmaceutical composition as described herein.

[0370] Also provided herein are methods of killing a cell comprising the step of contacting the cell, either in vitro or in vivo, with a CD20-binding molecule, and/or composition thereof. The CD20-binding molecule as described herein, and compositions thereof, can be used to kill a specific cell type upon contacting a cell or cells with one of the claimed compositions of matter. In some embodiments, a CD20-binding molecule as described herein and/or a composition thereof can be used to kill specific CD20+ cell types in a mixture of different cell types, such as mixtures comprising CD20+ cancer, tumor, hematologic, immune, and/or infected cells.

[0371] Also provided herein are methods of killing cell(s), the method comprising the step of contacting a cell(s), with a CD20-binding molecule as described herein, a CD20-binding molecule composition as described herein, a solvate as described herein, a salt as described herein, and/or a pharmaceutical composition as described herein; wherein the cell(s) is physically coupled with a CD20 having the extracellular part bound by the two or more binding regions of the CD20-binding molecule or a CD20-binding molecule of a composition as described herein. For certain embodiments, the step of contacting the cell(s) occurs in vitro. For certain other embodiments, the step of contacting the cell(s) occurs in vivo. In some embodiments, the cell(s) express at a cellular surface the CD20 which (1) have the extracellular part bound by the two or more CD20 binding regions of the CD20-binding molecule, (2) have a transmembrane domain, and (3) remain physically coupled to the cell. In some embodiments, the cell(s) is CD20 positive cells. For certain embodiments, the cell(s) is physically coupled with a significant amount of extracellular CD20 which (1) have the extracellular part bound by the two or more CD20 binding regions of the CD20-binding molecule. For certain embodiments, the cell(s) are descendants or members of a B-cell lineage. For certain embodiments, the cell(s) is a malignant B-cell, B-cell leukemia cell, B-cell lymphoma cell, B-cell myeloma cell, acute myeloid leukemia cell, acute non-lymphocytic leukemia cell, B-cell chronic lymphocytic leukemia cell, B-cell lymphoma cell, B-cell non-Hodgkin's lymphoma cell, B-cell precursor acute lymphoblastic leukemia cell, B-cell prolymphocytic leukemia cell, Burkitt's lymphoma cell, chronic lymphocytic leukemia cell, chronic myeloid leukemia cell, diffuse large B-cell lymphoma cell, follicular lymphoma cell, hairy cell leukemia cell, Hodgkin's lymphoma cell, immunoblastic large cell lymphoma cell, mantle cell lymphoma cell, melanoma cell, multiple myeloma cell, neoplastic plasma cell, nodular lymphocyte predominant Hodgkin's lymphoma cell, non-Hodgkin's lymphoma cell, plasmablastic lymphoma cell, plasma cell myeloma cell, precursor B-lymphoblastic lymphoma cell, small lymphocytic lymphoma cell, malignant T-cell, T-cell leukemia cell, T-cell lymphoma cell, T-cell large granular lymphocyte leukemia cell, T-cell prolymphocytic leukemia, healthy B-cell lineage cell, or healthy T-cell.

[0372] The CD20-binding molecule as described herein, and compositions thereof, have varied applications, including, e.g., uses in depleting unwanted CD20+ cell types from tissues either in vitro or in vivo, uses in modulating immune responses to treat graft-versus-host disease, and uses in purging transplantation tissues of unwanted CD20+ cell types. In some embodiments, a CD20-binding molecule as described herein and/or a composition thereof can be used to kill CD20+ cancer cells in a mixture of different cell types. In some embodiments, a CD20-binding molecule as described herein and/or a composition thereof can be used to kill specific CD20+ cell types in a mixture of different cell types, such as cells in pre-transplantation tissues. In some embodiments, a CD20-binding molecule as described herein and/or a composition thereof can be used to kill specific CD20+ cell types in a mixture of cell types, such as cells in pre-administration tissue material for therapeutic purposes.

[0373] In some embodiments, a CD20-binding molecule as described herein and/or a composition thereof, alone or in combination with other compounds or pharmaceutical compositions, can show potent cell-kill activity when administered to a population of cells in vitro or in vivo in a subject, such as, e.g., in a patient in need of treatment. By targeting the delivery of enzymatically active Shiga toxin regions using high-affinity binding regions to CD20, this potent cell-kill activity can be restricted to specifically and selectively kill certain cell types within an organism, such as certain CD20 positive cancer cells, neoplastic cells, malignant tumor cells, non-malignant tumor cells, and/or immune cells.

[0374] Additionally, provided herein is a method for delivering exogenous material to the inside of a cell(s) comprising contacting the cell(s), either in vitro or in vivo, with a CD20-binding molecule or pharmaceutical composition as described herein.

[0375] Further provided is a method for delivering exogenous material to the inside of a cell(s) in a patient, wherein the cell expresses CD20 on its surface, the method comprising the step of administering to the patient a CD20-binding molecule as described herein.

[0376] In humans, CD20 is expressed by normal, B-cell lineage cells within certain cell developmental stages as well as numerous mature B-cell neoplasms, such as in NHL and CLL. In addition, CD20 is expressed by mature T-cell and NK-cell neoplasms. CD20 is expressed by a subset of normal T-cells as well as malignant T-cells such as in T-cell lymphomas (TCLs), including mycosis fungoides (MF), natural killer cell lymphoma (NK-cell lymphoma), peripheral T-cell lymphomas (PTCLs), and cutaneous T-cell lymphomas. CD20 is expressed by malignant T-cells in T-cell large granular lymphocyte leukemia (T-LGLL).

[0377] Also provided herein is a method of killing a CD20+ cell in a patient in need thereof, the method comprising the step of administering to the patient at least one CD20-binding molecule as described herein or a composition thereof, such as, e.g., a pharmaceutical composition comprising a CD20-binding molecule as described herein.

[0378] Additionally, provided herein are methods of killing cells comprising the step of contacting the cell with a CD20-binding molecule described herein or a pharmaceutical composition described herein. In some embodiments, the step of contacting the cell(s) occurs in vitro. In certain other embodiments, the step of contacting the cell(s) occurs or in vivo.

[0379] In some embodiments, the CD20-binding molecule as described herein and/or a composition thereof is useful for killing malignant cells which express elevated levels of CD20 at a cellular surface. The CD20-binding molecule as described herein and/or a composition thereof is particularly useful for killing neoplastic cells which express elevated levels of CD20 at a cellular surface.

[0380] Certain embodiments of the CD20-binding molecule as described herein and/or a composition thereof can be used to kill a CD20-expressing cancer and/or tumor cell in a patient, such as, e.g. B-cell or T-cell cancers. The term “cancer cell” or “cancerous cell” refers to various neoplastic cells which grow and divide in an abnormally accelerated and/or unregulated fashion and will be clear to the skilled person. The term “tumor cell” includes both malignant and non-malignant cells (e.g. non-cancerous, benign tumor cells and non-cancerous “cancer” stem cells, tumor stem cells, pre-malignant cancer-initiating cells, tumor-initiating cells, or tumorigenic cells—all of which can give rise to daughter cells which become malignant tumor and/or cancer cells but are unable to metastasize on their own (see e.g. Martinez-Climent J et al., Haematologica 95: 293-302 (2010)). Generally, cancers and/or tumors can be defined as diseases, disorders, or conditions that are amenable to treatment and/or prevention. Neoplastic cells are often associated with one or more of the following: unregulated growth, lack of differentiation, local tissue invasion, angiogenesis, and metastasis. The cancers and tumors (either malignant or non-malignant) which are comprised of cancer cells and/or tumor cells which may benefit from methods and compositions described herein will be clear to the skilled person. The CD20-binding molecules and compositions described herein may be used to kill cancer stem cells, tumor stem cells, pre-malignant cancer-initiating cells, and tumor-initiating cells which commonly are slow dividing and resistant to cancer therapies like chemotherapy and radiation. For example, the following non-limiting examples of conditions involving cells with limited malignant potential may be diagnosed and/or treated using CD20-binding molecules as described herein: monoclonal B-cell lymphocytosis (MBL), localized follicular lymphoma (localized FL), gastric extranodal marginal zone (MALT) lymphomas, and intrafollicular neoplasia (Limpens J et al., Oncogene 6: 2271-6 (1991); Liu H et al., Lancet 357: 39-40 (2001); Richard P et al., J Clin Pathol 59: 995-6 (2006); Roulland S et. al.., J Exp Med 203: 2425-31 (2006); Marti G et al., Br J Haematol 139:701-8 (2007); Aqel N et al., Histopathology 52: 256-60 (2008); Rawstron A et al., N Engl J Med 359: 575-83 (2008)). Similarly, cancer initiating cells and/or cancer stem cells may be detected and/or treated using CD20-binding molecules described herein, such as, e.g., acute myeloid leukemia (AML) stem cells, B-cell non-Hodgkin's lymphoma (B-cell NHL) initiating cells, chronic myeloid leukemia (CML) stem cells, Hodgkin's lymphoma (HL or HD) stem-like cells, and mantle cell lymphoma (MCL) initiating cells (see e.g. Hope K et al., Nat Immunol 5: 738-43 (2004); Wang J, Dick J, Trends Cell Biol 15: 494-501 (2005); Ishikawa F et al., Nat Biotechnol 25: 1315-21 (2007); Jones R et al., Blood 113: 5920-6 (2009); Chen Z et al., Stem Cell Res 5: 212-225 (2010); Chomel J et al., Blood 118: 3657-60 (2011); Druker B, J Clin Invest 121: 396-409 (2011); Gerber J et al., Blood 119: 3571-7 (2012)).

[0381] Certain embodiments of the CD20-binding molecule as described herein and/or a composition thereof can be used to kill an immune cell (whether healthy or malignant) in a patient by targeting an extracellular part of CD20 found physically coupled with the immune cell. Certain embodiments of the CD20-binding molecules described herein, and compositions thereof, may be used to kill a healthy CD20+ immune cell(s) in a patient. CD20 is expressed by normal, B-cell lineage cells within certain cell developmental stages (van Meerten T et al., Clin Cancer Res 12: 4027-35 (2006)). CD20 is expressed by a subset of normal T-cells (Martin B et al., J Cutan Pathol 38: 663-9 (2011)).

[0382] It is within the scope as described herein to utilize the CD20-binding molecule as described herein and/or a composition thereof for the purposes of purging patient cell populations (e.g. bone marrow) of malignant, neoplastic, or otherwise unwanted B-cells and/or T-cells and then reinfusing the B-cell and/or T-cell depleted material into the patient.

[0383] It is within the scope as described herein to utilize the CD20-binding molecule as described herein and/or a composition thereof for the purposes of ex vivo depletion of B-cells and/or T-cells from isolated cell populations removed from a patient. In one non-limiting example, the CD20-binding molecule as described herein and/or a composition thereof may be used in a method for prophylaxis of organ and/or tissue transplant rejection wherein the donor organ or tissue is perfused prior to transplant with a cytotoxic CD20-binding molecule as described herein and/or a composition thereof in order to purge the organ of unwanted donor B-cells and/or T-cells.

[0384] It is also within the scope as described herein to utilize the CD20-binding molecule as described herein and/or a composition thereof for the purposes of depleting B-cells and/or T-cells from a donor cell population as a prophylaxis against graft-versus-host disease, and induction of tolerance, in a patient to undergo a bone marrow and or stem cell transplant.

[0385] It is within the scope as described herein to provide a bone marrow recipient for prophylaxis or treatment of host-versus-graft disease via the targeted cell-killing of host B-cells and/or T-cells using CD20-binding molecule as described herein and/or a composition thereof (see e.g. Sarantopoulos S et al., Biol Blood Marrow Transplant 21: 16-23 (2015)).

[0386] Additionally, provided herein is a method of treating a disease, disorder, or condition in a patient comprising the step of administering to a patient in need thereof a therapeutically effective amount of at least one of the CD20-binding molecule as described herein and/or composition thereof. Contemplated diseases, disorders, and conditions that can be treated using this method include cancers, malignant tumors, non-malignant tumors, growth abnormalities, and immune disorders. In some embodiments, the disease, disorder, or condition to be treated using this method described herein involves a cell(s) or cell type(s) which express CD20 on a cellular surface, such as, e.g., a cancer cell, a tumor cell, or an immune cell. A further embodiment is a method of treating a disease involving a cancer or tumor cell associated with the disease selected from the group consisting of: bone cancer, leukemia, lymphoma, melanoma, or myeloma. In some embodiments of this method, the disorder is an immune disorder associated with a disease selected from the group consisting of: amyloidosis, ankylosing spondylitis, asthma, Crohn's disease, diabetes, graft rejection, graft-vs.-host disease, Hashimoto's thyroiditis, hemolytic uremic syndrome, HIV-related diseases, lupus erythmatosis, multiple sclerosis, polyarteritis, psoriasis, psoriatic arthritis, rheumatoid arthritis, scleroderma, septic shock, Sjorgren's syndrome, ulcerative colitis, and vasculitis. Administration of a “therapeutically effective dosage” of a composition described herein may result in a decrease in severity of disease symptoms, an increase in frequency and duration of disease symptom-free periods, or a prevention of impairment or disability due to the disease affliction.

[0387] The therapeutically effective amount of a composition as described herein will depend on the route of administration, the type of mammal being treated, and the physical characteristics of the specific patient under consideration. These factors and their relationship to determining this amount are well known to skilled practitioners in the medical arts. This amount and the method of administration can be tailored to achieve optimal efficacy, and may depend on such factors as weight, diet, concurrent medication and other factors, well known to those skilled in the medical arts. The dosage sizes and dosing regimen most appropriate for human use may be guided by the results obtained and may be confirmed in properly designed clinical trials. An effective dosage and treatment protocol may be determined by conventional means, starting with a low dose in laboratory animals and then increasing the dosage while monitoring the effects, and systematically varying the dosage regimen as well. Numerous factors may be taken into consideration by a clinician when determining an optimal dosage for a given subject. Such considerations are known to the skilled person.

[0388] In some embodiments, the CD20-binding molecule is administered intravenously to the subject in an amount of about 1 μg/kg to about 100 μg/kg of the subject's body weight, wherein the CD20-binding molecule is administered once per week, twice per week, or three times per week for two or more consecutive weeks, such as four or five consecutive weeks. In some embodiments, the CD20-binding molecule is administered intravenously to the subject in an amount of about 30 μg/kg to about 100 μg/kg of the subject's body weight, wherein the CD20-binding molecule is administered once per week, twice per week, or three times per week for two or more consecutive weeks, such as four or five consecutive weeks. In some embodiments, the CD20-binding molecule is administered intravenously to the subject in an amount of about 15 μg/kg to about 50 μg/kg of the subject's body weight, wherein the CD20-binding molecule is administered once per week, twice per week, or three times per week for two or more consecutive weeks, such as four or five consecutive weeks. In some embodiments, the CD20-binding molecule is administered intravenously to the subject in an amount of about 1 μg/kg to about 10 μg/kg, about 10 μg/kg to about 25 μg/kg, about 25 μg/kg to about 50 μg/kg or about 50 μg/kg to about 750 μg/kg of the subject's body weight. In some embodiments, the CD20-binding molecule is administered intravenously to the subject in an amount of about 1 μg/kg, about 2 μg/kg, about 3 μg/kg, about 4 μg/kg, about 5 μg/kg, about 6 μg/kg, about 7 μg/kg, about 8 μg/kg, about 9 μg/kg, about 10 μg/kg, about 11 μg/kg, about 12 μg/kg, about 13 μg/kg, about 14 μg/kg, about 15 μg/kg, about 16 μg/kg, about 17 μg/kg, about 18 μg/kg, about 19 μg/kg, about 20 μg/kg, about 21 μg/kg, about 22 μg/kg, about 23 μg/kg, about 24 μg/kg, about 25 μg/kg, about 26 μg/kg, about 27 μg/kg, about 28 μg/kg, about 29 μg/kg, about 30 μg/kg, about 31 μg/kg, about 32 μg/kg, about 33 μg/kg, about 34 μg/kg, about 35 μg/kg, about 36 μg/kg, about 37 μg/kg, about 38 μg/kg, about 39 μg/kg, about 40 μg/kg, about 41 μg/kg, about 42 μg/kg, about 43 μg/kg, about 44 μg/kg, about 45 μg/kg, about 46 μg/kg, about 47 μg/kg, about 48 μg/kg, about 49 μg/kg, about 50 μg/kg, about 51 μg/kg, about 52 μg/kg, about 53 μg/kg, about 54 μg/kg, about 55 μg/kg, about 56 μg/kg, about 57 μg/kg, about 58 μg/kg, about 59 μg/kg, about 60 μg/kg, about 61 μg/kg, about 62 μg/kg, about 63 μg/kg, about 64 μg/kg, about 65 μg/kg, about 66 μg/kg, about 67 μg/kg, about 68 μg/kg, about 69 μg/kg, about 70 μg/kg, about 71 μg/kg, about 72 μg/kg, about 73 μg/kg, about 74 μg/kg, about 75 μg/kg, about 80 μg/kg, about 85 μg/kg, about 90 μg/kg, about 95 μg/kg, or about 100 μg/kg of the subject's body weight. In some embodiments, the CD20-binding molecule is administered once per week, twice per week, or three times per week for two or more consecutive weeks, such as four or five consecutive weeks. In some embodiments, the CD20-binding molecule is administered intravenously to the subject in an amount of about 10 μg/kg, about 25 μg/kg, about 50 μg/kg, or about 75 μg/kg of the subject's body weight, wherein the CD20-binding molecule is administered once, twice, or three times per week for two or more consecutive weeks, such as four or five consecutive weeks.

[0389] In some embodiments, the CD20-binding molecule is administered intravenously to the subject in an amount of about 1 μg/kg to about 100 μg/kg of the subject's body weight, wherein the CD20-binding molecule is administered once per week, twice per week, or three times per week for two or more weeks, such as five weeks with a dosing holiday for the entire third week. In some embodiments, the CD20-binding molecule is administered intravenously to the subject in an amount of about 30 μg/kg to about 100 μg/kg of the subject's body weight, wherein the CD20-binding molecule is administered once per week, twice per week, or three times per week for two or more weeks, such as five weeks with a dosing holiday for the entire third week. In some embodiments, the CD20-binding molecule is administered intravenously to the subject in an amount of about 15 μg/kg to about 50 μg/kg of the subject's body weight, wherein the CD20-binding molecule is administered once per week, twice per week, or three times per week for two or more weeks, such as five weeks with a dosing holiday for the entire third week. In some embodiments, the CD20-binding molecule is administered intravenously to the subject in an amount of about 1 μg/kg, about 2 μg/kg, about 3 μg/kg, about 4 μg/kg, about 5 μg/kg, about 6 μg/kg, about 7 μg/kg, about 8 μg/kg, about 9 μg/kg, about 10 μg/kg, about 11 μg/kg, about 12 μg/kg, about 13 μg/kg, about 14 μg/kg, about 15 μg/kg, about 16 μg/kg, about 17 μg/kg, about 18 μg/kg, about 19 μg/kg, about 20 μg/kg, about 21 μg/kg, about 22 μg/kg, about 23 μg/kg, about 24 μg/kg, about 25 μg/kg, about 26 μg/kg, about 27 μg/kg, about 28 μg/kg, about 29 μg/kg, about 30 μg/kg, about 31 μg/kg, about 32 μg/kg, about 33 μg/kg, about 34 μg/kg, about 35 μg/kg, about 36 μg/kg, about 37 μg/kg, about 38 μg/kg, about 39 μg/kg, about 40 μg/kg, about 41 μg/kg, about 42 μg/kg, about 43 μg/kg, about 44 μg/kg, about 45 μg/kg, about 46 μg/kg, about 47 μg/kg, about 48 μg/kg, about 49 μg/kg, about 50 μg/kg, about 51 μg/kg, about 52 μg/kg, about 53 μg/kg, about 54 μg/kg, about 55 μg/kg, about 56 μg/kg, about 57 μg/kg, about 58 μg/kg, about 59 μg/kg, about 60 μg/kg, about 61 μg/kg, about 62 μg/kg, about 63 μg/kg, about 64 μg/kg, about 65 μg/kg, about 66 μg/kg, about 67 μg/kg, about 68 μg/kg, about 69 μg/kg, about 70 μg/kg, about 71 μg/kg, about 72 μg/kg, about 73 μg/kg, about 74 μg/kg, about 75 μg/kg, about 80 μg/kg, about 85 μg/kg, about 90 μg/kg, about 95 μg/kg, or about 100 μg/kg of the subject's body weight, wherein the CD20-binding molecule is administered once per week, twice per week, or three times per week for two or more weeks, such as five weeks with a dosing holiday for the entire third week. In some embodiments, the CD20-binding molecule is administered intravenously to the subject in an amount of about 10 μg/kg, about 25 μg/kg, about 50 μg/kg, or about 75 μg/kg of the subject's body weight, wherein the CD20-binding molecule is administered once, twice, or three times per week for two or more weeks, such as five weeks with a dosing holiday for the entire third week.

[0390] In some embodiments, the CD20-binding molecules described herein may be administered to the same subject on multiple occasions. Intervals between single doses can be, for example, 1 to 4 days, weekly, monthly, every two or three months, every six months, or yearly. Intervals between administrations can also be irregular, based on regulating blood levels of the active compound or based on other markers, indications, or signs present in the subject.

[0391] An acceptable route of administration may refer to any administration pathway known in the art, including but not limited to aerosol, enteral, nasal, ophthalmic, oral, parenteral, rectal, vaginal, or transdermal (e.g. topical administration of a cream, gel or ointment, or by means of a transdermal patch). “Parenteral administration” is typically associated with injection at or in communication with the intended site of action, including infraorbital, infusion, intraarterial, intracapsular, intracardiac, intradermal, intramuscular, intraperitoneal, intrapulmonary, intraspinal, intrasternal, intrathecal, intrauterine, intravenous, subarachnoid, subcapsular, subcutaneous, transmucosal, or transtracheal administration.

[0392] In some embodiments of the methods described herein, the CD20-binding molecule is administered intravenously.

[0393] In some embodiments, a method for treating or slowing the progression of a disease, disorder, or condition comprises administering to a subject in need thereof an effective amount of a CD20-binding molecule. In some embodiments, the CD20-binding molecule comprises a polypeptide having the sequence of SEQ ID NO: 54. In some embodiments, the CD20-binding molecule is a homodimer comprising two identical polypeptides. In some embodiments, each identical polypeptide has the amino acid sequence of SEQ ID NO: 54; and wherein there is a disulfide bond at each cysteine residue at amino acid position 503 of SEQ ID NO: 54.

[0394] In some embodiments, the effective amount is administered in a single dose. For example, in some embodiments, the effective amount is a single dose of about 1 μg/kg, about 2 μg/kg, about 3 μg/kg, about 4 μg/kg, about 5 μg/kg, about 6 μg/kg, about 7 μg/kg, about 8 μg/kg, about 9 μg/kg, about 10 μg/kg, about 11 μg/kg, about 12 μg/kg, about 13 μg/kg, about 14 μg/kg, about 15 μg/kg, about 16 μg/kg, about 17 μg/kg, about 18 μg/kg, about 19 μg/kg, about 20 μg/kg, about 21 μg/kg, about 22 μg/kg, about 23 μg/kg, about 24 μg/kg, about 25 μg/kg, about 26 μg/kg, about 27 μg/kg, about 28 μg/kg, about 29 μg/kg, about 30 μg/kg, about 31 μg/kg, about 32 μg/kg, about 33 μg/kg, about 34 μg/kg, about 35 μg/kg, about 36 μg/kg, about 37 μg/kg, about 38 μg/kg, about 39 μg/kg, about 40 μg/kg, about 41 μg/kg, about 42 μg/kg, about 43 μg/kg, about 44 μg/kg, about 45 μg/kg, about 46 μg/kg, about 47 μg/kg, about 48 μg/kg, about 49 μg/kg, about 50 μg/kg, about 51 μg/kg, about 52 μg/kg, about 53 μg/kg, about 54 μg/kg, about 55 μg/kg, about 56 μg/kg, about 57 μg/kg, about 58 μg/kg, about 59 μg/kg, about 60 μg/kg, about 61 μg/kg, about 62 μg/kg, about 63 μg/kg, about 64 μg/kg, about 65 μg/kg, about 66 μg/kg, about 67 μg/kg, about 68 μg/kg, about 69 μg/kg, about 70 μg/kg, about 71 μg/kg, about 72 μg/kg, about 73 μg/kg, about 74 μg/kg, about 75 μg/kg, about 80 μg/kg, about 85 μg/kg, about 90 μg/kg, about 95 μg/kg, about 100 μg/kg, about 125 μg/kg, about 150 μg/kg, about 175 μg/kg, about 200 μg/kg, about 225 μg/kg, about 250 μg/kg, about 275 μg/kg, about 300 μg/kg, about 325 μg/kg, about 350 μg/kg, about 375 μg/kg, about 400 μg/kg, about 425 μg/kg, about 450 μg/kg, about 500 μg/kg, about 525 μg/kg, or about 550 μg/kg. In some embodiments, the effective amount is a single dose of about 10 μg/kg, about 25 μg/kg, about 50 μg/kg, or about 75 μg/kg.

[0395] In some embodiments, the amount of CD20-binding molecule administered to the subject in a single dose is about 0.1 mg to about 10 mg. In some embodiments, the amount of CD20-binding molecule administered to the subject in a single dose is about 0.5 mg to about 10 mg. In some embodiments, the amount of CD20-binding molecule administered to the subject in a single dose is about 0.1 mg, about 0.2 mg, about 0.3 mg, about 0.4 mg, about 0.5 mg, about 0.6 mg, about 0.7 mg, about 0.8 mg, about 0.9 mg, about 1.0 mg, about 1.1 mg, about 1.2 mg, about 1.3 mg, about 1.4 mg, about 1.5 mg, about 1.6 mg, about 1.7 mg, about 1.8 mg, about 1.9 mg, about 2.0 mg, about 2.1 mg, about 2.2 mg, about 2.3 mg, about 2.4 mg, about 2.5 mg, about 2.6 mg, about 2.7 mg, about 2.8 mg, about 2.9 mg, about 3.0 mg, about 3.1 mg, about 3.2 mg, about 3.3 mg, about 3.4 mg, about 3.5 mg, about 3.6 mg, about 3.7 mg, about 3.8 mg, about 3.9 mg, about 4.0 mg, about 4.1 mg, about 4.2 mg, about 4.3 mg, about 4.4 mg, about 4.5 mg, about 4.6 mg, about 4.7 mg, about 4.8 mg, about 4.9 mg, about 5.0 mg, about 5.1 mg, about 5.2 mg, about 5.3 mg, about 5.4 mg, about 5.5 mg, about 5.6 mg, about 5.7 mg, about 5.8 mg, about 5.9 mg, about 6.0 mg, about 6.5 mg, about 7.0 mg, about 7.5 mg, about 8.0 mg, about 8.5 mg, about 9.0 mg, about 9.5 mg, or about 10 mg.

[0396] In some embodiments, the amount of CD20-binding molecule administered to the subject in a single cycle (e.g., a 28-day cycle or 42-day cycle) is about 1 mg to about 100 mg. In some embodiments, the amount of CD20-binding molecule administered to the subject in a single cycle (e.g., a 28-day cycle or 42-day cycle) is about 1 mg to about 50 mg. In some embodiments, the amount of CD20-binding molecule administered to the subject in a single cycle (e.g., a 28-day cycle or 42-day cycle) is about 5 mg to about 100 mg. In some embodiments, the amount of the CD20-binding molecule administered to the subject in a single cycle (e.g., a 28-day cycle or 42-day cycle) is about 1 mg, about 2 mg, about 3 mg, about 4 mg, about 5 mg, about 6 mg, about 7 mg, about 8 mg, about 9 mg, about 10 mg, about 11 mg, about 12 mg, about 13 mg, about 14 mg, about 15 mg, about 16 mg, about 17 mg, about 18 mg, about 19 mg, about 20 mg, about 21 mg, about 22 mg, about 23 mg, about 24 mg, about 25 mg, about 26 mg, about 27 mg, about 28 mg, about 29 mg, about 30 mg, about 31 mg, about 32 mg, about 33 mg, about 34 mg, about 35 mg, about 36 mg, about 37 mg, about 38 mg, about 39 mg, about 40 mg, about 41 mg, about 42 mg, about 43 mg, about 44 mg, about 45 mg, about 46 mg, about 47 mg, about 48 mg, about 49 mg, about 50 mg, about 51 mg, about 52 mg, about 53 mg, about 54 mg, about 55 mg, about 56 mg, about 57 mg, about 58 mg, about 59 mg, about 60 mg, about 61 mg, about 62 mg, about 63 mg, about 64 mg, about 65 mg, about 66 mg, about 67 mg, about 68 mg, about 69 mg, about 70 mg, about 71 mg, about 72 mg, about 73 mg, about 74 mg, about 75 mg, about 76 mg, about 77 mg, about 78 mg, about 79 mg, about 80 mg, about 81 mg, about 82 mg, about 83 mg, about 84 mg, about 85 mg, about 86 mg, about 87 mg, about 88 mg, about 89 mg, about 90 mg, about 91 mg, about 92 mg, about 93 mg, about 94 mg, about 95 mg, about 96 mg, about 97 mg, about 98 mg, about 99 mg, or about 100 mg.

[0397] In some embodiments, the amount of CD20-binding molecule administered to the subject over one or more cycles is about 5 mg to about 1000 mg. In some embodiments, the amount of CD20-binding molecule administered to the subject over one or more cycles is about 5 mg to about 250 mg. In some embodiments, the amount of CD20-binding molecule administered to the subject over one or more cycles is about 5 mg, about 10 mg, about 15 mg, about 20 mg, about 25 mg, about 30 mg, about 35 mg, about 40 mg, about 45 mg, about 50 mg, about 55 mg, about 60 mg, about 65 mg, about 70 mg, about 75 mg, about 80 mg, about 85 mg, about 90 mg, about 95 mg, about 100 mg, about 105 mg, about 110 mg, about 115 mg, about 120 mg, about 125 mg, about 130 mg, about 135 mg, about 140 mg, about 145 mg, about 150 mg, about 155 mg, about 160 mg, about 165 mg, about 170 mg, about 175 mg, about 180 mg, about 185 mg, about 190 mg, about 195 mg, about 200 mg, about 205 mg, about 210 mg, about 215 mg, about 220 mg, about 225 mg, about 230 mg, about 235 mg, about 240 mg, about 245 mg, about 250 mg, about 260 mg, about 270 mg, about 280 mg, about 290 mg, about 300 mg, about 310 mg, about 320 mg, about 330 mg, about 340 mg, about 350 mg, about 360 mg, about 370 mg, about 380 mg, about 390 mg, about 400 mg, about 410 mg, about 420 mg, about 430 mg, about 440 mg, about 450 mg, about 460 mg, about 470 mg, about 480 mg, about 490 mg, about 500 mg, about 525 mg, about 550 mg, about 575 mg, about 600 mg, about 625 mg, about 650 mg, about 675 mg, about 700 mg, about 725 mg, about 750 mg, about 775 mg, about 800 mg, about 825 mg, about 850 mg, about 875 mg, about 900 mg, about 925 mg, about 950 mg, about 975 mg, or about 1000 mg.

[0398] In some embodiments, the effective amount is divided and administered over multiple doses, such that the total cumulative amount administered over all doses is the effective amount. For example, in some embodiments, the effective amount is divided and administered over multiple doses, wherein each dose is individually selected from about 10 μg/kg, about 25 μg/kg, about 50 μg/kg, or about 75 μg/kg of the subject's body weight. In some embodiments, the effective amount is about 100 μg/kg to about 2000 μg/kg of the subject's body weight (i.e., about 200 μg/kg to about 400 μg/kg, about 300 μg/kg to about 800 μg/kg, or about 500 μg/kg to about 1000 μg/kg of the subject's body weight), wherein the effective amount is divided and administered over multiple doses. In some embodiments, the effective amount is about 150 μg/kg, about 155 μg/kg, about 160 μg/kg about 165 μg/kg, about 170 μg/kg, about 175 μg/kg, about 180 μg/kg, about 185 μg/kg, about 190 μg/kg, about 195 μg/kg, about 200 μg/kg, about 205 μg/kg, about 210 μg/kg, about 215 μg/kg, about 220 μg/kg, about 225 μg/kg, about 230 μg/kg, about 235 μg/kg, about 240 μg/kg, about 245 μg/kg, about 250 μg/kg, about 255 μg/kg, about 260 μg/kg, about 265 μg/kg, about 270 μg/kg, about 275 μg/kg, about 280 μg/kg, about 285 μg/kg, about 290 μg/kg, about 295 μg/kg, about 300 μg/kg, about 305 μg/kg, about 310 μg/kg, about 315 μg/kg, about 320 μg/kg, about 325 μg/kg, about 330 μg/kg, about 335 μg/kg, about 340 μg/kg, about 345 μg/kg, about 350 μg/kg, about 355 μg/kg, about 360 μg/kg, about 365 μg/kg, about 370 μg/kg, about 375 μg/kg, about 380 μg/kg, about 385 μg/kg, about 390 μg/kg, about 395 μg/kg, about 400 μg/kg, about 405 μg/kg, about 410 μg/kg, about 415 μg/kg, about 420 μg/kg, about 425 μg/kg, about 430 μg/kg, about 435 μg/kg, about 440 μg/kg, about 445 μg/kg, about 450 μg/kg, about 455 μg/kg, about 460 μg/kg, about 465 μg/kg, about 470 μg/kg, about 475 μg/kg, about 480 μg/kg, about 485 μg/kg, about 490 μg/kg, about 495 μg/kg, about 500 μg/kg, about 505 μg/kg, about 510 μg/kg, about 515 μg/kg, about 520 μg/kg, about 525 μg/kg, about 530 μg/kg, about 535 μg/kg, about 540 μg/kg, about 545 μg/kg, or about 550 μg/kg of the subject's body weight, wherein the effective amount is divided and administered over multiple doses. In some embodiments, the effective amount is divided and administered over 2, 3, 4, 5, 6, 7, 8, 9, 10, 11, 12, 13, 14, 15, 16, 17, 18, 19, 20, 21, 22, 23, 24, 25, or more doses.

[0399] In some embodiments, a first dose and a second dose of a CD20-binding molecule are administered to a subject. In some embodiments, the second dose is higher than the first dose. For example, the second dose may be greater than the first dose by about 1.1-fold, about 1.2-fold, about 1.3-fold, about 1.4-fold, about 1.5-fold, about 1.6-fold, about 1.7-fold, about 1.8-fold, about 1.9-fold, about 2-fold, about 3-fold, about 5-fold, about 10-fold, about 25-fold, or about 50-fold higher than the first dose, or more. In some embodiments, the second dose is lower than the first dose. For example, the second dose may lower than the first dose by about 5%, about 10%, about 15%, about 20%, about 25%, about 30%, about 35%, about 40%, about 45%, about 50%, about 60%, about 70%, about 80%, about 90%, about 100%, about 200%, about 500%, or more.

[0400] In some embodiments, the dose of the CD20-binding molecule is increased during the course of treatment. In some embodiments, the dose of the CD20-binding molecule is increased once per week, twice per week, three times per week, four times per week, 5 times per week, once every 2 weeks, once every 3 weeks, once per month, once every 2 months, once every 3 months, once every 4 months, once every 5 months, once every 6 months, or once per year during the course of treatment. In some embodiments, the dose of the CD20-binding molecule is increased from about 10 μg/kg to about 20 μg/kg, about 25 μg/kg, about 30 μg/kg, about 35 μg/kg, about 40 μg/kg, about 45 μg/kg, about 50 μg/kg, about 55 μg/kg, about 60 μg/kg, about 65 μg/kg, about 70 μg/kg, about 75 μg/kg, about 80 μg/kg, about 85 μg/kg, about 90 μg/kg, about 95 μg/kg, about 100 μg/kg, about 125 μg/kg, about 150 μg/kg, about 175 μg/kg, about 200 μg/kg, about 225 μg/kg, or about 250 μg/kg of the subject's body weight. In some embodiments, the dose of the CD20-binding molecule is increased from about 25 μg/kg to about 30 μg/kg, about 35 μg/kg, about 40 μg/kg, about 45 μg/kg, about 50 μg/kg, about 55 μg/kg, about 60 μg/kg, about 65 μg/kg, about 70 μg/kg, about 75 μg/kg, about 80 μg/kg, about 85 μg/kg, about 90 μg/kg, about 95 μg/kg, about 100 μg/kg, about 125 μg/kg, about 150 μg/kg, about 175 μg/kg, about 200 μg/kg, about 225 μg/kg, about 250 μg/kg, about 275 μg/kg, or about 300 μg/kg of the subject's body weight. In some embodiments, the dose of the CD20-binding molecule is increased from about 50 μg/kg to about 55 μg/kg, about 60 μg/kg, about 65 μg/kg, about 70 μg/kg, about 75 μg/kg, about 80 μg/kg, about 85 μg/kg, about 90 μg/kg, about 95 μg/kg, about 100 μg/kg, about 125 μg/kg, about 150 μg/kg, about 175 μg/kg, about 200 μg/kg, about 225 μg/kg, about 250 μg/kg, about 275 μg/kg, about 300 μg/kg, about 325 μg/kg, about 350 μg/kg, about 375 μg/kg, or about 400 μg/kg of the subject's body weight. In some embodiments, the dose of the CD20-binding molecule is increased from about 75 μg/kg to about 80 μg/kg, about 85 μg/kg, about 90 μg/kg, about 95 μg/kg, about 100 μg/kg, about 125 μg/kg, about 150 μg/kg, about 175 μg/kg, about 200 μg/kg, about 225 μg/kg, about 250 μg/kg, about 275 μg/kg, about 300 μg/kg, about 325 μg/kg, about 350 μg/kg, about 375 μg/kg, about 400 μg/kg, about 425 μg/kg, about 450 μg/kg, about 475 μg/kg, or about 500 μg/kg of the subject's body weight.

[0401] In some embodiments, the dose of the CD20-binding molecule is increased during a 42-day cycle. In some embodiments, the dose of the CD20-binding molecule is increased during a first 28-day cycle following the 42-day cycle. In some embodiments, the dose of the CD20-binding molecule is increased during a second 28-day cycle following the first 28-day cycle and the 42-day cycle. In some embodiments, the dose of the CD20-binding molecule is increased during a third 28-day cycle following the first and second 28-day cycles and the 42-day cycle. In some embodiments, the dose of the CD20-binding molecule is increased during an at least one additional 28-day cycle following the first, second, and third 28-day cycles and the 42-day cycle.

[0402] In some embodiments, the dose of the CD20-binding molecule is increased during a first 28-day cycle. In some embodiments, the dose of the CD20-binding molecule is increased during a second 28-day cycle following the first 28-day cycle. In some embodiments, the dose of the CD20-binding molecule is increased during a third 28-day cycle following the first and second 28-day cycles. In some embodiments, the dose of the CD20-binding molecule is increased during an at least one additional 28-day cycle following the first, second, and third 28-day cycles.

[0403] In some embodiments, the dose of the CD20-binding molecule is decreased during the course of treatment. In some embodiments, the dose of the CD20-binding molecule is decreased once per week, twice per week, three times per week, four times per week, 5 times per week, once every 2 weeks, once every 3 weeks, once per month, once every 2 months, once every 3 months, once every 4 months, once every 5 months, once every 6 months, or once per year during the course of treatment.

[0404] In some embodiments, the dose of the CD20-binding molecule is decreased from about 10 μg/kg to about 5 μg/kg, about 2.5 μg/kg, about 1 μg/kg, about 0.5 μg/kg, about 0.1 μg/kg, about 0.05 μg/kg, or about 0.01 μg/kg of the subject's body weight. In some embodiments, the dose of the CD20-binding molecule is decreased from about 25 μg/kg to about 20 μg/kg, about 15 μg/kg, about 10 μg/kg, about 5 μg/kg, about 2.5 μg/kg, about 1 μg/kg, about 0.5 μg/kg, about 0.1 μg/kg, about 0.05 μg/kg, or about 0.01 μg/kg of the subject's body weight. In some embodiments, the dose of the CD20-binding molecule is decreased from about 50 μg/kg to about 45 μg/kg, about 40 μg/kg, about 35 μg/kg, about 30 μg/kg, about 25 μg/kg, about 20 μg/kg, about 15 μg/kg, about 10 μg/kg, about 5 μg/kg, about 1 μg/kg, about 0.5 μg/kg, about 0.1 μg/kg, about 0.05 μg/kg, or about 0.01 μg/kg of the subject's body weight. In some embodiments, the dose of the CD20-binding molecule is decreased from about 75 μg/kg to about 70 μg/kg, about 65 μg/kg, about 60 μg/kg, about 55 μg/kg, about 50 μg/kg, about 45 μg/kg, about 40 μg/kg, about 35 μg/kg, about 30 μg/kg, about 25 μg/kg, about 20 μg/kg, about 15 μg/kg, about 10 μg/kg, about 5 μg/kg, about 1 μg/kg, about 0.5 μg/kg, about 0.1 μg/kg, about 0.05 μg/kg, or about 0.01 μg/kg of the subject's body weight.

[0405] In some embodiments, the dose of the CD20-binding molecule is decreased during a 42-day cycle. In some embodiments, the dose of the CD20-binding molecule is decreased during a first 28-day cycle following the 42-day cycle. In some embodiments, the dose of the CD20-binding molecule is decreased during a second 28-day cycle following the first 28-day cycle and the 42-day cycle. In some embodiments, the dose of the CD20-binding molecule is decreased during a third 28-day cycle following the first and second 28-day cycles and the 42-day cycle. In some embodiments, the dose of the CD20-binding molecule is decreased during an at least one additional 28-day cycle following the first, second, and third 28-day cycles and the 42-day cycle.

[0406] In some embodiments, the dose of the CD20-binding molecule is decreased during a first 28-day cycle. In some embodiments, the dose of the CD20-binding molecule is decreased during a second 28-day cycle following the first 28-day cycle. In some embodiments, the dose of the CD20-binding molecule is decreased during a third 28-day cycle following the first and second 28-day cycles. In some embodiments, the dose of the CD20-binding molecule is decreased during an at least one additional 28-day cycle following the first, second, and third 28-day cycles.

[0407] In some embodiments, the CD20-binding molecule is administered once per week, twice per week, three times per week, four times per week, five times per week, six times per week, or seven times per week. In some embodiments, the CD20-binding molecule is administered once per week, wherein the dose of the CD20-binding molecule is in an amount of about 10 μg/kg, about 25 μg/kg, about 50 μg/kg, or about 75 μg/kg of the subject's body weight. In some embodiments, the CD20-binding molecule is administered twice per week, wherein each dose of the CD20-binding molecule is in an amount of about 10 μg/kg, about 25 μg/kg, about 50 μg/kg, or about 75 μg/kg of the subject's body weight. In some embodiments, the CD20-binding molecule is administered three times per week, wherein each dose of the CD20-binding molecule is in an amount of about 10 μg/kg, about 25 μg/kg, about 50 μg/kg, or about 75 μg/kg of the subject's body weight. In some embodiments, the CD20-binding molecule is administered four times per week, wherein each dose of the CD20-binding molecule is in an amount of about 10 μg/kg, about 25 μg/kg, about 50 μg/kg, or about 75 μg/kg of the subject's body weight. In some embodiments, the CD20-binding molecule is administered five times per week, wherein each dose of the CD20-binding molecule is in an amount of about 10 μg/kg, about 25 μg/kg, about 50 μg/kg, or about 75 μg/kg of the subject's body weight. In some embodiments, the CD20-binding molecule is administered six times per week, wherein each dose of the CD20-binding molecule is in an amount of about 10 μg/kg, about 25 μg/kg, about 50 μg/kg, or about 75 μg/kg of the subject's body weight. In some embodiments, the CD20-binding molecule is administered seven times per week, wherein each dose of the CD20-binding molecule is in an amount of about 10 μg/kg, about 25 μg/kg, about 50 μg/kg, or about 75 μg/kg of the subject's body weight.

[0408] In some embodiments, the step of administering the CD20-binding molecule comprises administering ten doses of the CD20-binding molecule on about 1, 3, 5, 8, 10, 12, 15, 22, 29 and 36 of a 42-day cycle; wherein each dose is in an amount of about 10 μg/kg, about 25 μg/kg, about 50 μg/kg, or about 75 μg/kg of the subject's body weight. In some embodiments, the method further comprises administering the CD20-binding molecule weekly during a first 28-day cycle following the 42-day cycle on days 1, 8, 15, and 22 of the first 28-day cycle. In some embodiments, the method further comprises administering the CD20-binding molecule weekly during a second 28-day cycle following the first 28-day cycle and the 42-day cycle, wherein the CD20 binding molecule is administered on days 1, 8, 15, and 22 of the second 28-day cycle. In some embodiments, the method further comprises administering the CD20-binding molecule weekly during a third 28-day cycle following the first and second 28-day cycle and the 42-day cycle, wherein the CD20 binding molecule is administered on days 1, 8, 15, and 22 of the third 28-day cycle. In some embodiments, the method further comprises administering the CD20-binding molecule weekly during a fourth 28-day cycle following the first, second, and third 28-day cycle and the 42-day cycle, wherein the CD20 binding molecule is administered on days 1, 8, 15, and 22 of the fourth 28-day cycle. In some embodiments, each dose administered during the first, second, third, and/or fourth 28-day cycle is in an amount of about 10 μg/kg, about 25 μg/kg, about 50 μg/kg, or about 75 μg/kg of the subject's body weight. As used herein, the numbered days of the cycle refer to days relative to day 1, i.e., the day in which the first dose of the CD20-binding molecule is administered in that cycle.

[0409] In some embodiments, the step of administering the CD20-binding molecule comprises administering six doses of the CD20-binding molecule on days 1, 3, 5, 8, 10, and 12 of a first 28-day cycle, wherein each dose is in an amount of about 10 μg/kg, about 20 μg/kg, about 25 μg/kg, about 50 μg/kg, or about 75 μg/kg of the subject's body weight. In some embodiments, the method further comprises administering the CD20-binding molecule weekly during a second 28-day cycle following the first 28-day cycle, wherein the CD20-binding molecule is administered on days 1, 8, 15, and 22 of the second 28-day cycle. In some embodiments, the method further comprises administering the CD20-binding molecule weekly during a third 28-day cycle following the first and second 28-day cycle, wherein the CD20-binding molecule is administered on days 1, 8, 15, and 22 of the third 28-day cycle. In some embodiments, the method further comprises administering the CD20-binding molecule weekly during a fourth 28-day cycle following the first, second, and third 28-day cycle, wherein the CD20-binding molecule is administered on days 1, 8, 15, and 22 of the fourth 28-day cycle. In some embodiments, the method further comprises administering the CD20-binding molecule weekly during a fifth 28-day cycle following the first, second, third, and fourth 28-day cycle, wherein the CD20-binding molecule is administered on days 1, 8, 15, and 22 of the fifth 28-day cycle. In some embodiments, the method further comprises administering the CD20-binding molecule weekly during a sixth 28-day cycle following the first, second, third, fourth, and fifth 28-day cycle, wherein the CD20-binding molecule is administered on days 1, 8, 15, and 22 of the sixth 28-day cycle.

[0410] In some embodiments, the step of administering the CD20-binding molecule comprises administering six doses of the CD20-binding molecule on days 1, 3, 5, 8, 10, and 12 of a first 28-day cycle, wherein each dose is in an amount of about 10 μg/kg of the subject's body weight. In some embodiments, the method further comprises administering the CD20-binding molecule weekly during a second 28-day cycle following the first 28-day cycle, wherein the CD20-binding molecule is administered on days 1, 8, 15, and 22 of the second 28-day cycle, wherein each dose is in an amount of about 10 μg/kg of the subject's body weight.

[0411] In some embodiments, the step of administering the CD20-binding molecule comprises administering six doses of the CD20-binding molecule on days 1, 3, 5, 8, 10, and 12 of a first 28-day cycle, wherein each dose is in an amount of about 25 μg/kg of the subject's body weight. In some embodiments, the method further comprises comprising administering the CD20-binding molecule weekly during a second 28-day cycle following the first 28-day cycle, wherein the CD20-binding molecule is administered on days 1, 8, 15, and 22 of the second 28-day cycle, wherein each dose is in an amount of about 25 μg/kg of the subject's body weight.

[0412] In some embodiments, the step of administering the CD20-binding molecule comprises administering six doses of the CD20-binding molecule on days 1, 3, 5, 8, 10, and 12 of a first 28-day cycle, wherein each dose is in an amount of about 20 μg/kg of the subject's body weight. In some embodiments, the method further comprises administering the CD20-binding molecule weekly during a second 28-day cycle following the first 28-day cycle, wherein the CD20-binding molecule is administered on days 1, 8, 15, and 22 of the second 28-day cycle, wherein each dose is in an amount of about 20 μg/kg of the subject's body weight.

[0413] In some embodiments, the step of administering the CD20-binding molecule comprises administering four doses of the CD20-binding molecule on days 1, 5, 8, and 12 of a first 28-day cycle, wherein each dose is in an amount of about 25 μg/kg of the subject's body weight. In some embodiments, the method further comprises administering the CD20-binding molecule during a second 28-day cycle following the first 28-day cycle, wherein the CD20-binding molecule is administered on days 1, 5, 8, and 12 of the second 28-day cycle, wherein each dose is in an amount of about 25 μg/kg of the subject's body weight. In some embodiments, the method further comprises administering the CD20-binding molecule during a third 28-day cycle following the first and second 28-day cycle, wherein the CD20-binding molecule is administered on days 1, 8, 15, and 22 of the third 28-day cycle, wherein each dose is in an amount of about 25 μg/kg of the subject's body weight.

[0414] In some embodiments, the step of administering the CD20-binding molecule comprises administering four doses of the CD20-binding molecule on days 1, 5, 8, and 12 of a first 28-day cycle, wherein each dose is in an amount of about 50 μg/kg of the subject's body weight. In some embodiments, the method further comprises administering the CD20-binding molecule during a second 28-day cycle following the first 28-day cycle, wherein the CD20-binding molecule is administered on days 1, 5, 8, and 12 of the second 28-day cycle, wherein each dose is in an amount of about 50 μg/kg of the subject's body weight. In some embodiments, the method further comprises administering the CD20-binding molecule during a third 28-day cycle following the first and second 28-day cycle, wherein the CD20-binding molecule is administered on days 1, 8, 15, and 22 of the third 28-day cycle, wherein each dose is in an amount of about 50 μg/kg of the subject's body weight.

[0415] In some embodiments, each dose of the CD20-binding molecule is an intravenous infusion that is administered over about 30 to about 75 minutes, such as about 31, about 32, about 33, about 34, about 35, about 36, about 37, about 38, about 39, about 40, about 41, about 42, about 43, about 44, about 45, about 46, about 47, about 48, about 49, about 50, about 51, about 52, about 53, about 54, about 55, about 56, about 57, about 58, about 59, about 60, about 61, about 62, about 63, about 64, about 65, about 66, about 67, about 68, about 69, about 70, about 71, about 72, about 73, about 74, or about 75 minutes. In some embodiments, each dose of the CD20-binding molecule is an intravenous infusion that is administered over about 60 minutes.

[0416] In some embodiments, the step of administering the CD20-binding molecule comprises administering six doses of the CD20-binding molecule over 12 days of a 21-day cycle, each dose being an intravenous infusion that is administered over about 1 hour, wherein each dose is in an amount of about 10 μg/kg, about 25 μg/kg, about 50 μg/kg, or about 75 μg/kg of the subject's body weight. In some embodiments, administering a subsequent dose of the CD20-binding molecules occurs at least about 24 hours administering a prior dose. In some embodiments, the administering of the CD20-binding molecule takes occurs on a Monday, Wednesday and Friday of two successive weeks in a 21-day cycle. In some embodiments, the methods may further comprise repeating the 21-day cycle of administering the CD20-binding molecule. In some embodiments, the methods may further comprise repeating the 21-day cycle of administering the CD20-binding molecule once, twice, three times, four times, five times, six times, seven times, or more than seven times.

[0417] In some embodiments, after the completion of the one or more 21-day cycles of administering the CD20-binding molecule, the methods further comprise administering the CD20-binding molecule weekly following the 21-day cycle(s). In some embodiments, the methods further comprise administering the CD20-binding molecule weekly following the 21-day cycle(s) for 2, 3, 4, 5, 6, 7, 8, 9, 10, 11, or more than 11 weeks. In some embodiments, the methods further comprise administering the CD20-binding molecule weekly during a 28-day cycle following the 21-day cycle(s).

[0418] In some embodiments, the step of administering the CD20-binding molecule comprises administering ten doses of the CD20-binding molecule, each dose being an intravenous infusion that is administered over about 1 hour on days 1, 3, 5, 8, 10, 12, 15, 22, 29 and 36 of a 42-day cycle, wherein each dose is in an amount of about 10 μg/kg, about 25 μg/kg or about 50 μg/kg of the subject's body weight. In some embodiments, the methods may further comprise repeating the 42-day cycle of administering the CD20-binding molecule once, twice, three times, four times, five times, six times, seven times, or more than seven times.

[0419] In some embodiments, after the completion of the one or more 42-day cycles of administering the CD20-binding molecule, the methods further comprise administering the CD20-binding molecule weekly following the 42-day cycle(s). In some embodiments, the methods further comprise administering the CD20-binding molecule weekly following the 42-day cycle(s) for 2, 3, 4, 5, 6, 7, 8, 9, 10, 11, or more than 11 weeks. In some embodiments, the methods further comprise administering the CD20-binding molecule weekly during a 28-day cycle following the 42-day cycle(s).

[0420] In some embodiments, a method for treating or slowing the progression of a disease, disorder, or condition that comprises administering to a subject in need thereof an effective amount of a CD20-binding molecule further comprises administering to the subject one or more additional therapeutic agents. Thus, in some embodiments, a method for treating or slowing the progression of a disease, disorder, or condition, the method comprising administering to a subject in need thereof an effective amount of: (i) a CD20-binding molecule; and (ii) one or more additional therapeutic agents; wherein the CD20-binding molecule comprises a polypeptide having the sequence of SEQ ID NO: 54.

[0421] In some embodiments, the one or more additional therapeutic agents are administered on the same day as the CD20-binding molecule. In some embodiments, the one or more additional therapeutic agents are administered at least one day after the CD20-binding molecule is administered.

[0422] In some embodiments wherein the CD20-binding molecule is administered on days 1, 3, 5, 8, 10, 12, 15, 22, 29 and 36 of a 42 day cycle, the one or more additional therapeutic agents are administered on day 16 and day 30 of the 42-day cycle. In some embodiments wherein the CD20 binding molecule is administered on days 1, 3, 5, 8, 10, and 12 of a 28-day cycle, the one or more additional therapeutic agents are administered daily on days 1-21 of that 28-day cycle.

[0423] In some embodiments wherein the CD20-binding molecule is administered on days 1, 8, 15, and 22 of a 28-day cycle, the one or more additional therapeutic agents are administered on day 2 and day 16 of the 28-day cycle. In some embodiments wherein the CD20 binding molecule is administered on days 1, 8, 15, and 22 of a 28-day cycle, the one or more additional therapeutic agents are administered daily on days 1-21 of that 28-day cycle.

[0424] In some embodiments, the one or more additional therapeutic agents comprise oxaliplatin and gemcitabine. Thus, in some embodiments, the methods comprise administering (a) the CD20-binding molecule as described herein and (b) (i) gemcitabine or a pharmaceutically acceptable salt thereof or (ii) oxaliplatin. In some embodiments, the methods comprise administering (a) the CD20-binding molecule as described herein and (b) (i) gemcitabine or a pharmaceutically acceptable salt thereof and (ii) oxaliplatin. In some embodiments, the gemcitabine (or pharmaceutically acceptable salt thereof) and oxaliplatin are a GEMOX regimen known in the art. In some embodiments, the gemcitabine and the oxaliplatin are administered in separate compositions. In some embodiments, the gemcitabine and the oxaliplatin are adminstered as a fixed-dose combination (FDC).

[0425] In some embodiments, the gemcitabine is administered at about 1,000 mg/m² as an intravenous infusion over about 30 minutes (e.g., about 15 to about 45 minutes). In some embodiments, the oxaliplatin is administered at about 100 mg/m² as an intravenous infusion over about 2 hours (e.g., about 1 hour to about 3 hours). In some embodiments, the oxaliplatin and the gemcitabine are administered on the same day, and wherein the oxaliplatin is administered after administration of the gemcitabine on that day. In some embodiments, the oxaliplatin and the gemcitabine are administered on the same day, and wherein the oxaliplatin is administered before administration of the gemcitabine on that day. In some embodiments, the oxaliplatin is infusion is initiated about 1 hour after the infusion of the gemcitabine concludes (e.g., about 30 minutes to about 2 hours after the infusion of the gemcitabine concludes).

[0426] In some embodiments, the methods further comprise administering to the subject gemcitabine or a pharmaceutically acceptable salt thereof at a dose of about 1,000 mg/m² on days 16 and 30 of a 42-day cycle; wherein each dose of gemcitabine or pharmaceutically acceptable salt thereof is administered as an intravenous infusion over about 30 minutes. In some embodiments, the methods further comprise administering to the subject gemcitabine or a pharmaceutically acceptable salt thereof at a dose of about 1,000 mg/m² on days 2 and 16 of the 28-day cycle; wherein each dose of gemcitabine or pharmaceutically acceptable salt thereof is administered as an intravenous infusion over about 30 minutes. In some embodiments, a first 42-day cycle is followed by one or more 28-day cycles. In some embodiments, each subsequent 28-day cycle includes administering to the subject gemcitabine or a pharmaceutically acceptable salt thereof at a dose of about 1,000 mg/m² on days 2 and 16 of the 28-day cycle; wherein each dose of gemcitabine or pharmaceutically acceptable salt thereof is administered as an intravenous infusion over about 30 minutes. In some embodiments, gemcitabine is not administered in the same week as the CD20 binding molecule.

[0427] In some embodiments, the methods further comprise administering to the subject gemcitabine or a pharmaceutically acceptable salt thereof at a dose of about 1,000 mg/m² on days 2 and 16 of one or more 28-day cycles (cycle 2 and on following a first cycle of 42-days); wherein each dose of gemcitabine or pharmaceutically acceptable salt thereof is administered as an intravenous infusion over about 30 minutes. In some further embodiments, gemcitabine is not administered in the same week as the CD20 binding molecule.

[0428] In some embodiments, the methods further comprises administering to the subject oxaliplatin at a dose of about 100 mg/m² on days 16 and 30 of the 42-day cycle; wherein each dose of oxaliplatin is administered as an intravenous infusion over about 2 hours; and wherein each dose of oxaliplatin is administered after the start of each infusion of gemcitabine or a pharmaceutically acceptable salt thereof. In some embodiments, the methods further comprise administering to the subject oxaliplatin at a dose of about 100 mg/m² on days 16 and 30 of the 42-day cycle; wherein each dose of oxaliplatin is administered as an intravenous infusion over about 2 hours; and wherein each dose of oxaliplatin or a pharmaceutically acceptable salt thereof is administered about one hour after the start of each infusion of gemcitabine or a pharmaceutically acceptable salt thereof. In some embodiments, the methods further comprise administering to the subject oxaliplatin at a dose of about 100 mg/m² on days 2 and 16 of each 28-day cycle; wherein each dose of oxaliplatin is administered as an intravenous infusion over about 2 hours; and wherein each dose of oxaliplatin is administered about one hour after the start of each infusion of gemcitabine or a pharmaceutically acceptable salt thereof. In some embodiments, oxaliplatin is not administered in the same week as the CD20 binding molecule.

[0429] In some embodiments, after the completion of the one or more 21-day cycles of administering the CD20-binding molecule as described herein, the methods further comprise administering the CD20-binding molecule once every other week following the 21-day cycle(s) and administering gemcitabine or a pharmaceutically acceptable salt thereof and oxaliplatin on alternate weeks from the administering of the CD20-binding molecule.

[0430] In some embodiments, the one or more additional therapeutic agents comprise an immunomodulatory drug. Thus, in some embodiments, the methods further comprise administering to the subject an immunomodulatory drug. In some embodiments, the immunomodulatory drug is administered orally. In some embodiments, the immunomodulatory drug is adminstered at a dose of about 10 mg to about 100 mg daily, such as about 20 mg. In some embodiments, the immunomodulatory drug is administered orally at a dose of about 20 mg on each of days 1 and 21 of the 28-day cycle.

[0431] In some embodiments, the immunomodulatory drug is lenalidomide or a pharmaceutically acceptable salt thereof. In some embodiments, the lenalidomide is administered at a dose of about 20 milligram per day. In some embodiments, the lenalidomide is administered orally. In some embodiments, the lenalidomide is administered orally at a dose of about 20 mg on each of days 1 and 21 of a 28-day cycle. In some embodiments, the lenalidomide is administered orally at a dose of about 20 mg on each of days 1 and 21 of a 28-day cycle, wherein the CD20-binding molecule is administered on days 1, 5, 8, and 12 of that cycle or days 1, 8, 15, and 22 of that cycle.

[0432] In some embodiments, the one or more additional therapeutic agents is a Bruton's tyrosine kinase (BTK) inhibitor. In some embodiments, the methods comprise administering to the subject lenalidomide or a pharmaceutically acceptable salt thereof and a BTK inhibitor. In some embodiments, the methods comprise administering to the subject gemcitabine and/or oxaliplatin, and a BTK inhibitor. Exemplary BTK inhibitors include, but are not limited to, ibrutinib, zanubrutinib, and acalabrutinib.

[0433] In some embodiments, the one or more additional therapeutic agents is an inhibitor of phosphoinositide 3-kinase (PI3K). In some embodiments, the methods comprise administering to the subject lenalidomide or a pharmaceutically acceptable salt thereof and a PI3K inhibitor. In some embodiments, the methods comprise administering to the subject gemcitabine and/or oxaliplatin, and a PI3K inhibitor. Exemplary PI3K inhibitors include, but are not limited to, alpelisib, idelalisib, copanlisib, and duvelisib.

[0434] In some embodiments, the methods comprise administering the CD20-binding molecule as described herein and an immunomodulatory drug. In some embodiments, the immunomodulatory drug is an mTOR inhibitor, rapalog, and/or an ATP-competitive mTOR kinase inhibitor. In some embodiments, the methods further comprise administering to the subject everolimus, temsirolimus, ridaforolimus, sirolimus (rapamycin), or a derivative thereof. In some embodiments, the methods further comprise administering to the subject the immunomodulatory drug orally at a dose of about 0.1 to 5 mg/kg. In some embodiments, the methods further comprise administering to the subject an immunomodulatory drug on any one of or all of days 1 through 14 of the first cycle. In some embodiments, the methods further comprise administering to the subject the immunomodulatory drug orally using a loading dose of about 1 to 15 mg/kg on day 1 and one or more maintenance doses of about 0.1 to 5 mg/kg throughout days 2 to 14. In some embodiments, the CD20-binding protein is administered by an intravenous infusion that is administered over about 1 hour on about days 3, 5, 7, 10, 12, and 14 of a 24-day cycle.

[0435] In some embodiments, the dosage range for administration of the pharmaceutical composition may generally be from about 0.0001 to 1 milligram per kilogram (mg/kg), and more usually 0.005 to 0.5 mg/kg, of the subject's body weight. Illustrative dosages may be 0.01 mg/kg body weight, 0.015 mg/kg body weight, 0.05 mg/kg body weight, 0.085 mg/kg body weight or 0.1 mg/kg body weight or within the range of 0.01-0.1 mg/kg. An illustrative treatment regime is a once or twice daily administration, or a once or twice weekly administration, once every two weeks, once every three weeks, once every four weeks, once a month, once every two or three months or once every three to 6 months. Dosages may be selected and readjusted by the skilled health care professional as required to maximize therapeutic benefit for a particular patient.

[0436] For intravenous administration of a pharmaceutical composition described herein, the dosage range may generally be from about 0.01 to 500 micrograms (μg) per kilogram (kg) of the subject's body weight (μg/kg), and more, usually 0.5 to 75 μg/kg. Illustrative dosages may be 1 μg/kg body weight, 5 μg/kg body weight, 10 μg/kg body weight, 20 μg/kg body weight, 25 μg/kg body weight, 35 μg/kg body weight, or 50 μg/kg body weight or within the range of 1 to 50 μg/kg. An illustrative treatment regime is a once or twice daily administration, or a once or twice weekly administration, once every two weeks, once every three weeks, once every four weeks, once a month, once every two or three months or once every three to 6 months.

[0437] A CD20-binding molecule as described herein and/or a composition thereof may be administered via one or more routes of administration, using one or more of a variety of methods known in the art. As will be appreciated by the skilled worker, the route and/or mode of administration will vary depending upon the desired results. Routes of administration for CD20-binding molecule compositions, pharmaceutical compositions, and diagnostic compositions as described herein include, e.g. intravenous, intramuscular, intradermal, intraperitoneal, subcutaneous, spinal, or other parenteral routes of administration, for example by injection or infusion. In other embodiments, a CD20-binding molecule as described herein and/or a composition thereof may be administered by a non-parenteral route, such as a topical, epidermal or mucosal route of administration, for example, intranasally, orally, vaginally, rectally, sublingually, or topically.

[0438] For certain embodiments of the methods as described herein, the administering step involves a parenteral administration of a CD20-binding molecule as described herein and/or a composition thereof (e.g. a pharmaceutical composition as described herein). In some embodiments, the administering step involves an intravenous administration of a CD20-binding molecule as described herein and/or a composition thereof (e.g. a pharmaceutical composition as described herein).

[0439] For certain embodiments of the methods as described herein, the method comprises the step of diluting a pharmaceutical composition as described herein in an aqueous solution, sterile water, dextrose solution, dextrose monohydrate, hydrous dextrose, saline solution, and/or sodium chloride solution prior to the administering step.

[0440] Therapeutic CD20-binding molecule as described herein and/or a composition thereof may be administered with one or more of a variety of medical devices known in the art. For example, in one embodiment, a pharmaceutical composition described herein may be administered with a needleless hypodermic injection device. Examples of well-known implants and modules useful in the methods disclosed herein are in the art, including e.g., implantable micro-infusion pumps for controlled rate delivery; devices for administering through the skin; infusion pumps for delivery at a precise infusion rate; variable flow implantable infusion devices for continuous drug delivery; and osmotic drug delivery systems. These and other such implants, delivery systems, and modules are known to those skilled in the art.

[0441] A CD20-binding molecule as described herein and/or a composition thereof may be administered alone or in combination with one or more other therapeutic or diagnostic agents. A combination therapy may include a CD20-binding molecule as described herein and/or a pharmaceutical composition thereof combined with at least one other therapeutic agent selected based on the particular patient, disease or condition to be treated. Examples of other such agents include, inter alia, a cytotoxic, anti-cancer or chemotherapeutic agent, an anti-inflammatory or anti-proliferative agent, an antimicrobial or antiviral agent, growth factors, cytokines, an analgesic, a therapeutically active small molecule or polypeptide, a single chain antibody, a classical antibody or fragment thereof, or a nucleic acid molecule which modulates one or more signaling pathways, and similar modulating therapeutics which may complement or otherwise be beneficial in a therapeutic or prophylactic treatment regimen.

[0442] Treatment of a patient with a CD20-binding molecule as described herein and/or a composition thereof preferably leads to cell death of targeted CD20+ cells and/or the inhibition of growth of targeted CD20+ cells. As such, certain CD20-binding molecules as described herein, and pharmaceutical compositions comprising them, will be useful in methods for treating a variety of pathological disorders in which killing or depleting CD20+ target cells may be beneficial, such as, inter alia, cancers, tumors, immune disorders, and growth abnormalities involving CD20+ cells. Also provided herein are methods for suppressing cell proliferation, and treating cell disorders, including neoplasia, overactive B-cells, and overactive T-cells.

[0443] CD20 is expressed by cells involved in a variety of malignancies, such as, e.g., hematologic diseases, rheumatic diseases, hematologic cancers, leukemias, lymphomas, melanomas, myelomas, B-cell lymphomas, B-cell non-Hodgkins lymphomas (B-cell NHL), Burkitt's lymphomas (BL), B-cell chronic lymphocytic leukemias (B-cell CLL), chronic lymphocytic leukemias (CLL), diffuse large B-cell lymphomas (DLBCL or DLBL), follicular lymphomas (FL), hairy cell leukemias (HCL), Hodgkins lymphomas (HD), immunoblastic large cell lymphomas, mantle cell lymphomas (MCL), melanomas, non-Hodgkins lymphomas (NHL), precursor B-lymphoblastic lymphomas (B-LBL), small lymphocytic lymphoma (SLL), and T-cell lymphomas (TCL), amyloidosis, ankylosing spondylitis, asthma, Crohn's disease, diabetes, graft rejection, graft-versus-host disease, Hashimoto's thyroiditis, hemolytic uremic syndrome, HIV-related diseases, lupus erythematosus, multiple sclerosis, polyarteritis nodosa, polyarthritis, psoriasis, psoriatic arthritis, rheumatoid arthritis, scleroderma, septic shock, Sjorgren's syndrome, ulcerative colitis, and/or vasculitis.

[0444] In some embodiments CD20-binding molecules as described herein and/or a composition thereof can be used to treat or prevent cancers, tumors (malignant and non-malignant), growth abnormalities, and immune disorders. In a further aspect, the above ex vivo method can be combined with the above in vivo method to provide methods of treating or preventing rejection in bone marrow transplant recipients, and for achieving immunological tolerance.

[0445] In some embodiments, the CD20-binding molecules described herein are used to treat cancer and, in some embodiments, the cancer is a hematologic cancer or a solid tumor. In some embodiments, the cancer large B-cell lymphoma, such as large B-cell lymphoma that is relapsed or refractory to at least one additional treatment (i.e., treatment with an anti-cancer drug). In some embodiments, the cancer is diffuse large B-cell lymphoma, such as diffuse large B-cell lymphoma that is relapsed or refractory to at least one additional treatment (i.e., treatment with an anti-cancer drug). In some embodiments, the cancer is non-Hodgkin's B-cell lymphoma, such as non-Hodgkin's B-cell lymphoma that is relapsed or refractory to at least one additional treatment (i.e., treatment with an anti-cancer drug). In some embodiments, the cancer is mantle cell lymphoma, such as mantle cell lymphoma that is relapsed or refractory to at least one additional treatment (i.e., treatment with an anti-cancer drug). In some embodiments, the cancer is follicular lymphoma, such as follicular lymphoma that is relapsed/refractory to at least one additional therapy.

[0446] Also provided herein are methods for treating or slowing the progression of a disease, disorder, or condition, comprising administering to a subject in need thereof an effective amount of (i) a CD20-binding molecule and (ii) an additional therapeutic agent, wherein: the CD20-binding molecule comprises: (a) a CD20-binding region, wherein the CD20-binding region is capable of specifically binding an extracellular portion of a CD20 protein, and (b) a Shiga toxin effector region.

[0447] In some embodiments, the CD20-binding molecule is a multivalent CD20-binding molecule. In some embodiments, the CD20-binding molecule comprises two CD20-binding regions, wherein each CD20-binding region is capable of specifically binding an extracellular portion of a CD20 protein.

[0448] In some embodiments of the methods described herein, the additional therapeutic agent is a first additional therapeutic agent, and the method further comprises administering a second additional therapeutic agent. In some embodiments, the first additional therapeutic agent and the second additional therapeutic agent are present in the same composition. In some embodiments, the first additional therapeutic agent is present in a first composition and the second additional therapeutic agent is present in a second composition.

[0449] In some embodiments, the additional therapeutic agent is a chemotherapeutic agent. In some embodiments, the chemotherapeutic agent is a nucleoside analog or a platinum-based chemotherapeutic agent. In some embodiments, the nucleoside analog is gemcitabine, capecitabine, cladribine, clofarabine, cytarabine, decitabine, fludarabine or troxacitabine, or a pharmaceutically acceptable salt thereof. In some embodiments, the platinum-based chemotherapeutic agent is oxaliplatin, carboplatin, cisplatin or nedaplatin.

[0450] In some embodiments, the first additional therapeutic agent or the second additional therapeutic agent is a nucleoside analog or a platinum-based chemotherapeutic agent. In some embodiments, the first additional therapeutic agent is gemcitabine or a pharmaceutically acceptable salt thereof and the second additional therapeutic agent is oxaliplatin or a pharmaceutically acceptable salt thereof. In some embodiments, a CD20-binding molecule is administered in combination with a gemcitabine and oxaliplatin (GEMOX) regimen.

[0451] In some embodiments, the additional therapeutic agent is an immunomodulatory drug (IMiD). In some embodiments, the immunomodulatory drug is lenalidomide, apremilast, pomalidomide or thalidomide, or a pharmaceutically acceptable salt thereof. In some embodiments, the immunomodulatory drug is an mTOR inhibitor, rapalog, and/or an ATP-competitive mTOR kinase inhibitor; such as everolimus, temsirolimus, ridaforolimus, or sirolimus, or a pharmaceutically acceptable salt thereof.

[0452] In some embodiments, the additional therapeutic agent is a phosphoinositide 3-kinase (PI3K) inhibitor. In some embodiments, the PI3K inhibitor is alpelisib, idelalisib, copanlisib, or duvelisib, or a pharmaceutically acceptable salt thereof.

[0453] In some embodiments, the additional therapeutic agent is a Bruton's tyrosine kinase (BTK) inhibitor. In some embodiments, the BTK inhibitor is acalabrutinib, evobrutinib, ibrutinib, spebrutinib or zanubrutinib, or a pharmaceutically acceptable salt thereof.

[0454] In some embodiments, the first additional therapeutic agent is an immunomodulatory drug and the second additional therapeutic agent is a BTK inhibitor. In some embodiments, the first additional therapeutic agent is lenalidomide or a pharmaceutically acceptable salt thereof and the second additional therapeutic agent is a BTK inhibitor. In some embodiments, the first additional therapeutic agent is pomalidomide or a pharmaceutically acceptable salt thereof and the second additional therapeutic agent is a BTK inhibitor.

[0455] In some embodiments, the additional therapeutic agent is an mTOR inhibitor, rapalog, and/or an ATP-competitive mTOR kinase inhibitor; and optionally wherein the rapalog is everolimus, temsirolimus, ridaforolimus, or sirolimus, or a derivative of any of the aforementioned.

[0456] In some embodiments of the methods described herein, the CD20-binding molecule comprises or consists essentially of a polypeptide having the amino acid sequence of any one of SEQ ID NOs: 47-175 and 249-304. In some embodiments, the CD20-binding molecule is multimeric and comprises or consists essentially of: (a) two polypeptides, each polypeptide having the amino acid sequence of any one of SEQ ID NOs: 47-175 and 249-304; and (b) a cysteine disulfide bond linking the two polypeptides, wherein the cysteine disulfide bond is between a cysteine residue in each of the two polypeptides located at amino acid position 242, 482, 483, 484, 490, 491, 492, 493, 494, 495, 499, 500, 501, 502, 503, 504, 505, 510, 511, 512, 513, or 521 of the amino acid sequence of the polypeptide. In some embodiments, each polypeptide comprises an amino-terminal methionine residue.

[0457] In some embodiments, the CD20-binding molecule is a homodimer and consists essentially of (a) the two polypeptides, wherein the two polypeptides are identical; and (b) the cysteine disulfide bond.

[0458] In some embodiments, the two polypeptides are identical, and each polypeptide has the amino acid sequence of SEQ ID NO: 49; and the disulfide bond is between each cysteine residue at amino acid position 490 in SEQ ID NO:49. In some embodiments, the two polypeptides are identical, and each identical polypeptide has the amino acid sequence of any one of SEQ ID NO:50, SEQ ID NO:61, SEQ ID NO:73, SEQ ID NO:96, SEQ ID NO:101, and SEQ ID NO:102; and the disulfide bond is between each cysteine residue at amino acid position 501 of the amino acid sequence of each identical polypeptide. In some embodiments, the two polypeptides are identical, and each identical polypeptide has the amino acid sequence of any one of SEQ ID NO:53, SEQ ID NO:63, SEQ ID NO:66, SEQ ID NO:75, SEQ ID NO:83, SEQ ID NO:89, and SEQ ID NO:95; and the disulfide bond is between each cysteine residue at amino acid position 512 of the amino acid sequence of each identical polypeptide. In some embodiments, the two polypeptides are identical, and each identical polypeptide has the amino acid sequence of SEQ ID NO:54; and the disulfide bond is between each cysteine residue at amino acid position 503 of SEQ ID NO:54. In some embodiments, the two polypeptides are identical, and each identical polypeptide has the amino acid sequence of any one of SEQ ID NO:55, SEQ ID NO:64, SEQ ID NO:67, SEQ ID NO:76, SEQ ID NO:90, SEQ ID NO:92, SEQ ID NO:93, SEQ ID NO:97, and SEQ ID NO:98; and the disulfide bond is between each cysteine residue at amino acid position 502 of the amino acid sequence of each identical polypeptide. In some embodiments, the two polypeptides are identical, and each identical polypeptide has the amino acid sequence of any one of SEQ ID NO:56, SEQ ID NO:68, SEQ ID NO:91, SEQ ID NO:99, SEQ ID NO:103, and SEQ ID NO:104; and the disulfide bond is between each cysteine residue at amino acid position 492 of the amino acid sequence of each identical polypeptide. In some embodiments, the two polypeptides are identical, and each identical polypeptide has the amino acid sequence of any one of SEQ ID NO:57, SEQ ID NO:69, SEQ ID NO:78, SEQ ID NO:82, SEQ ID NO:84, SEQ ID NO:87, SEQ ID NO:88, SEQ ID NO:94, SEQ ID NO:110, SEQ ID NO:111, or SEQ ID NO:115; and the disulfide bond is between each cysteine residue at amino acid position 503 of the amino acid sequence of each identical polypeptide. In some embodiments, the two polypeptides are identical, and each identical polypeptide has the amino acid sequence of any one of SEQ ID NO:58, SEQ ID NO:70, and SEQ ID NO:81; and the disulfide bond is between each cysteine residue at amino acid position 493 of the amino acid sequence of each identical polypeptide. In some embodiments, the two polypeptides are identical, and each identical polypeptide has the amino acid sequence of any one of SEQ ID NOs: 249-304; and the disulfide bond is between each cysteine residue at amino acid position 242 of the amino acid sequence of each identical polypeptide.

[0459] In some embodiments of the methods described herein, the CD20-binding molecule is present as a mixture of monomers and dimers (e.g., homodimers). In some embodiments, the composition comprises CD20-binding molecule dimers that are substantially free of CD20-binding molecule monomers. “Substantially free” may refer to a mixture comprising less than about 5%, less than about 7.5% or less than about 10% of monomer molecules.

[0460] In some embodiments of the methods described herein, the CD20-binding molecule is present in a pharmaceutical composition, and the pharmaceutical composition comprises a pharmaceutically acceptable excipient or carrier. In some embodiments, the pharmaceutically acceptable excipient is acetate, alcohol, alpha-tocopherol, aluminum monostearate, ascorbic acid, ascorbyl palmitate, benzyl alcohol, butylated hydroxyanisole, butylated hydroxytoluene, chlorobutanol, citrate, cysteine hydrochloride, dextrose, ethanol, ethylenediaminetetraacetic acid, ethyloleate, gelatin, glycerine, glycerol, lactic acid, lecithin, mannitol, methyl parabens, monostearate salt, organic ester, paraben, phenol phosphate, phosphoric acid, polyalcohol, polyethylene glycol, polyol, propylene glycol, propylgallate, sodium bisulfate, sodium bisulfite, sodium chloride, sodium metabisulfite, sodium sulfite, sorbic acid, sorbitol, sugar, tartaric acid, or vegetable oil.

[0461] In some embodiments, the methods described herein are useful to treat a disease, disorder, or condition such as cancer, an abnormal growth condition or an immune disorder. In some embodiments, the cancer is a hematologic cancer or a solid tumor. In some embodiments, the disease is relapsed diffuse large B-cell lymphoma, refractory diffuse large B-cell lymphoma, relapsed/refractory diffuse large B-cell lymphoma or non-Hodgkin's B-cell lymphoma.

[0462] Certain embodiments described herein are below, numbered 1-49.

1. A method for treating or slowing the progression of a disease, disorder, or condition, comprising administering to a subject in need thereof an effective amount of (i) a CD20-binding molecule and (ii) an additional therapeutic agent, wherein: the CD20-binding molecule comprises: (a) a CD20-binding region, wherein the CD20-binding region is capable of specifically binding an extracellular portion of a CD20 protein, and (b) a Shiga toxin effector polypeptide.
2. The method of embodiment 1, wherein the CD20-binding molecule is a CD20-binding molecule.
3. The method of embodiment 1 or 2, wherein the CD20-binding molecule comprises two CD20-binding regions, wherein each CD20-binding region is capable of specifically binding an extracellular portion of a CD20 protein.
4. The method of any one of embodiments 1-3, wherein the additional therapeutic agent is a first additional therapeutic agent, and the method further comprises administering a second additional therapeutic agent.
5. The method of any one of embodiments 1-3, wherein the additional therapeutic agent is a chemotherapeutic agent.
6. The method of embodiment 5, wherein the chemotherapeutic agent is a nucleoside analog or a platinum-based chemotherapeutic agent.
7. The method of embodiment 4, wherein the first additional therapeutic agent or the second additional therapeutic agent is a nucleoside analog or a platinum-based chemotherapeutic agent.
8. The method of embodiment 6 or 7, wherein the nucleoside analog is gemcitabine, capecitabine, cladribine, clofarabine, cytarabine, decitabine, fludarabine, or troxacitabine, or a pharmaceutically acceptable salt thereof.
9. The method of embodiment 6 or 7, wherein the platinum-based chemotherapeutic agent is oxaliplatin, carboplatin, cisplatin, or nedaplatin.
10. The method of embodiment 4 or 7, wherein the first additional therapeutic agent and the second additional therapeutic agent are present in the same composition.
11. The method of embodiment 4 or 7, wherein the first additional therapeutic agent is present in a first composition and the second additional therapeutic agent is present in a second composition.
12. The method of any one of embodiments 4, 7, 10 and 11, wherein the first additional therapeutic agent is gemcitabine or a pharmaceutically acceptable salt thereof and wherein the second additional therapeutic agent is oxaliplatin or a pharmaceutically acceptable salt thereof.
13. The method of any one of embodiments 1-3, wherein the additional therapeutic agent is an immunomodulatory drug.
14. The method of embodiment 13, wherein the immunomodulatory drug is lenalidomide, apremilast, pomalidomide, or thalidomide, or a pharmaceutically acceptable salt thereof.
15. The method of embodiment 13, wherein the immunomodulatory drug is an mTOR inhibitor, rapalog, and/or an ATP-competitive mTOR kinase inhibitor; and optionally wherein the rapalog is everolimus, temsirolimus, ridaforolimus, or sirolimus or a derivative of any of the aforementioned.
16. The method of any one of embodiments 1-3, wherein the additional therapeutic agent is a Bruton's tyrosine kinase (BTK) inhibitor.
17. The method of embodiment 16, wherein the BTK inhibitor is acalabrutinib, evobrutinib, ibrutinib, spebrutinib or zanubrutinib, or a pharmaceutically acceptable salt thereof.
18. The method of any one of embodiments 4, 7, 10 and 11, wherein the first additional therapeutic agent is an immunomodulatory drug and wherein the second additional therapeutic agent is a BTK inhibitor. The method of any one of embodiments 4, 7, 10 and 11, wherein the first additional therapeutic agent is lenalidomide or pomalidomide and wherein the second additional therapeutic agent is a BTK inhibitor.
19. The method of any one of embodiments 1-18, wherein the CD20-binding molecule comprises, consists essentially of, or consists of a polypeptide having the amino acid sequence of any one of SEQ ID NOs: 47-175 and 249-304.
20. The method of any one of embodiments 1-18, wherein the CD20-binding molecule is multimeric and comprises, consists essentially of, or consists of: (a) two polypeptides, each polypeptide having the amino acid sequence of any one of SEQ ID NOs: 47-175 and 249-304; and (b) a cysteine disulfide bond linking the two polypeptides, wherein the cysteine disulfide bond is between a cysteine residue in each of the two polypeptides located at amino acid position 242, 482, 483, 484, 490, 491, 492, 493, 494, 495, 499, 500, 501, 502, 503, 504, 505, 510, 511, 512, 513, or 521 of the amino acid sequence of the polypeptide.
21. The method of embodiment 20, wherein each polypeptide comprises an amino-terminal methionine residue.
22. The method of embodiment 20 or 21, wherein the CD20-binding molecule is a homodimer and consists of or consists essentially of (a) the two polypeptides, wherein the two polypeptides are identical; and (b) the cysteine disulfide bond.
23. The method of embodiment 22, wherein each identical polypeptide has the amino acid sequence of SEQ ID NO:49; and wherein the disulfide bond is between each cysteine residue at amino acid position 490 in SEQ ID NO:49.
24. The method of embodiment 22, wherein each identical polypeptide has the amino acid sequence of any one of SEQ ID NO:50, SEQ ID NO:61, SEQ ID NO:73, SEQ ID NO:96, SEQ ID NO:101, and SEQ ID NO:102; and wherein the disulfide bond is between each cysteine residue at amino acid position 501 of the amino acid sequence of each identical polypeptide.
25. The method of embodiment 22, wherein each identical polypeptide has the amino acid sequence of any one of SEQ ID NO:53, SEQ ID NO:63, SEQ ID NO:66, SEQ ID NO:75, SEQ ID NO:83, SEQ ID NO:89, and SEQ ID NO:95; and wherein the disulfide bond is between each cysteine residue at amino acid position 512 of the amino acid sequence of each identical polypeptide.
26. The method of embodiment 22, wherein each identical polypeptide has the amino acid sequence of SEQ ID NO:54; and wherein the disulfide bond is between each cysteine residue at amino acid position 503 of SEQ ID NO:54.
27. The method of embodiment 22, wherein each identical polypeptide has the amino acid sequence of any one of SEQ ID NO:55, SEQ ID NO:64, SEQ ID NO:67, SEQ ID NO:76, SEQ ID NO:90, SEQ ID NO:92, SEQ ID NO:93, SEQ ID NO:97, and SEQ ID NO:98; and wherein the disulfide bond is between each cysteine residue at amino acid position 502 of the amino acid sequence of each identical polypeptide.
28. The method of embodiment 22, wherein each identical polypeptide has the amino acid sequence of any one of SEQ ID NO:56, SEQ ID NO:68, SEQ ID NO:91, SEQ ID NO:99, SEQ ID NO:103, and SEQ ID NO:104; and wherein the disulfide bond is between each cysteine residue at amino acid position 492 of the amino acid sequence of each identical polypeptide.
29. The method of embodiment 22, wherein each identical polypeptide has the amino acid sequence of any one of SEQ ID NO:57, SEQ ID NO:69, SEQ ID NO:78, SEQ ID NO:82, SEQ ID NO:84, SEQ ID NO:87, SEQ ID NO:88, SEQ ID NO:94, SEQ ID NO:110, SEQ ID NO:111, or SEQ ID NO:115; and wherein the disulfide bond is between each cysteine residue at amino acid position 503 of the amino acid sequence of each identical polypeptide.
30. The method of embodiment 22, wherein each identical polypeptide has the amino acid sequence of any one of SEQ ID NO:58, SEQ ID NO:70, and SEQ ID NO:81; and wherein the disulfide bond is between each cysteine residue at amino acid position 493 of the amino acid sequence of each identical polypeptide.
31. The method of embodiment 22, wherein each identical polypeptide has the amino acid sequence of any one of SEQ ID NOs: 249-304; and wherein the disulfide bond is between each cysteine residue at amino acid position 242 of the amino acid sequence of each identical polypeptide.
32. The method of any one of embodiments 1-31, wherein the CD20-binding molecule is present in a pharmaceutical composition, and wherein the pharmaceutical composition comprises at least one pharmaceutically acceptable excipient or carrier.
33. The method of embodiment 32, wherein the pharmaceutically acceptable excipient is acetate, alcohol, alpha-tocopherol, aluminum monostearate, ascorbic acid, ascorbyl palmitate, benzyl alcohol, butylated hydroxyanisole, butylated hydroxytoluene, chlorobutanol, citrate, cysteine hydrochloride, dextrose, ethanol, ethylenediaminetetraacetic acid, ethyloleate, gelatin, glycerine, glycerol, lactic acid, lecithin, mannitol, methyl parabens, monostearate salt, organic ester, paraben, phenol phosphate, phosphoric acid, polyalcohol, polyethylene glycol, polyol, propylene glycol, propylgallate, sodium bisulfate, sodium bisulfite, sodium chloride, sodium metabisulfite, sodium sulfite, sorbic acid, sorbitol, sugar, tartaric acid, or vegetable oil.
34. The method of any one of embodiments 1-33, wherein the disease, disorder, or condition is a cancer, an abnormal growth condition or an immune disorder.
35. The method of embodiment 34, wherein the disease, disorder or condition is cancer, and the cancer is a hematologic cancer or a solid tumor.
356. The method of any one of embodiments 1-35, wherein the disease, disorder, or condition is leukemia, lymphoma, melanoma, myeloma, acute myeloid leukemia, acute non-lymphocytic leukemia, B-cell chronic lymphocytic leukemia, B-cell lymphoma, B-cell non-Hodgkin's lymphoma, B-cell precursor acute lymphoblastic leukemia, B-cell prolymphocytic leukemia, Burkitt's lymphoma, chronic lymphocytic leukemia, chronic myeloid leukemia, diffuse large B-cell lymphoma, follicular lymphoma, hairy cell leukemia, Hodgkin's lymphoma, immunoblastic large cell lymphoma, mantle cell lymphoma, multiple myeloma, nodular lymphocyte predominant Hodgkin's lymphoma, non-Hodgkin's lymphoma, plasmablastic lymphoma, plasma cell neoplasma, plasma cell myeloma, precursor B-lymphoblastic lymphoma, small lymphocytic lymphoma, T-cell large granular lymphocyte leukemia, T-cell lymphoma, T-cell prolymphocytic leukemia, Waldenström's macroglobulinemia, amyloidosis, ankylosing spondylitis, asthma, Crohn's disease, diabetes, graft rejection, graft-versus-host disease, Graves' disease, Graves' ophthalmopathy, Hashimoto's thyroiditis, hemolytic uremic syndrome, HIV-related disease, lupus erythematosus, multiple sclerosis, neuromyelitis optica spectrum disorders, N-methyl D-aspartate receptor encephalitis, opsoclonus myoclonus syndrome, paroxysmal nocturnal hemoglobinuria, polyarteritis nodosa, polyarthritis, psoriasis, psoriatic arthritis, rheumatoid arthritis, scleritis, scleroderma, septic shock, Sjorgren's syndrome, ulcerative colitis, or vasculitis.
37. The method of any one of embodiments 1-35, wherein the disease is relapsed diffuse large B-cell lymphoma, refractory diffuse large B-cell lymphoma, relapsed/refractory diffuse large B-cell lymphoma or non-Hodgkin's B-cell lymphoma.
38. The method of any one of embodiments 1-37, wherein the administering of the CD20-binding molecule is administering intravenously.
39. The method of embodiment 38, wherein the administering of the CD20-binding molecule comprises administering six doses of the CD20-binding molecule, each dose being an intravenous infusion that is administered over about 1 hour, for 6 doses over 12 days of a 21-day cycle, wherein each dose is in an amount of about 10 μg/kg, about 25 μg/kg or about 50 μg/kg of the subject's body weight.
40. The method of embodiment 39, further comprising repeating the 21-day cycle of administering the CD20-binding molecule.
41. The method of embodiment 39 or 40, further comprising administering the CD20-binding molecule weekly following the 21-day cycle.
42. The method of embodiment 38, wherein the administering of the CD20-binding molecule comprises administering ten doses of the CD20-binding molecule, each dose being an intravenous infusion that is administered over about 1 hour on days 1, 3, 5, 8, 10, 12, 15, 22, 29 and 36 of a 42-day cycle; wherein each dose is in an amount of about 10 μg/kg, about 25 μg/kg, about 50 μg/kg, or about 75 μg/kg of the subject's body weight.
43. The method of embodiment 42, further comprising administering the CD20-binding molecule weekly during a 28-day cycle following the 42-day cycle.
44. The method of embodiment 42, further comprising administering to the subject gemcitabine or a pharmaceutically acceptable salt thereof at a dose of about 1,000 mg/m² on days 16 and 30 of the 42-day cycle; wherein each dose of gemcitabine or pharmaceutically acceptable salt thereof is administered as an intravenous infusion over about 30 minutes.
45. The method of embodiment 43, further comprising administering to the subject gemcitabine or a pharmaceutically acceptable salt thereof at a dose of about 1,000 mg/m² on days 2 and 16 of the 28-day cycle; wherein each dose of gemcitabine or pharmaceutically acceptable salt thereof is administered as an intravenous infusion over about 30 minutes.
46. The method of embodiment 42 or 44, further comprising administering to the subject oxaliplatin or a pharmaceutically acceptable salt thereof at a dose of about 100 mg/m² on days 16 and 30 of the 42-day cycle; wherein each dose of oxaliplatin or a pharmaceutically acceptable salt thereof is administered as an intravenous infusion over about 2 hours; and wherein each dose of oxaliplatin or a pharmaceutically acceptable salt thereof is administered about one hour after the start of each infusion of gemcitabine or a pharmaceutically acceptable salt thereof.
47. The method of embodiment 43 or 45, further comprising administering to the subject oxaliplatin or a pharmaceutically acceptable salt thereof at a dose of about 100 mg/m² on days 2 and 16 of each 28-day cycle; wherein each dose of oxaliplatin or a pharmaceutically acceptable salt thereof is administered as an intravenous infusion over about 2 hours; and wherein each dose of oxaliplatin or a pharmaceutically acceptable salt thereof is administered about one hour after the start of each infusion of gemcitabine or a pharmaceutically acceptable salt thereof.
48. The method of embodiment 39, further comprising administering to the subject an immunomodulatory drug orally at a dose of about 20 mg on each of days 1 and 21 of the 21-day cycle.
49. The method of embodiment 48, wherein the immunomodulatory drug is lenalidomide or a pharmaceutically acceptable salt thereof.

[0463] In some embodiments, provided herein are methods for treating a malignancy, a neoplasm or another blood cell associated cancer in a mammalian subject, such as a human, the method comprising the step of administering to a subject in need thereof an effective amount of a CD20-binding molecule as described herein and/or a composition thereof.

[0464] The CD20-binding molecule as described herein and/or a composition thereof have varied applications, including, e.g., uses in removing unwanted B-cells and/or T-cells, uses in modulating immune responses to treat graft-versus-host disease, uses as antiviral agents, uses as antimicrobial agents, and uses in purging transplantation tissues of unwanted cell types. The CD20-binding molecule as described herein and/or a composition thereof are commonly anti-neoplastic agents—meaning they are capable of treating and/or preventing the development, maturation, or spread of neoplastic or malignant cells by inhibiting the growth and/or causing the death of CD20+ cancer, neoplastic, or tumor cells.

[0465] In some embodiments, a CD20-binding molecule as described herein and/or a composition thereof is useful to treat a B-cell-, plasma cell-, T-cell- or antibody-mediated disease or disorder, such as for example hematologic diseases, rheumatic diseases, hematologic cancers, leukemias, lymphomas, melanomas, myelomas, B-cell lymphomas, B-cell non-Hodgkins lymphomas (B-cell NHL), Burkitt's lymphomas (BL), B-cell chronic lymphocytic leukemias (B-cell CLL), chronic lymphocytic leukemias (CLL), diffuse large B-cell lymphomas (DLBCL or DLBL), follicular lymphomas (FL), hairy cell leukemias (HCL), Hodgkins lymphomas (HD), immunoblastic large cell lymphomas, mantle cell lymphomas (MCL), melanomas, non-Hodgkins lymphomas (NHL), precursor B-lymphoblastic lymphomas (B-LBL), small lymphocytic lymphoma (SLL), and T-cell lymphomas (TCL), amyloidosis, ankylosing spondylitis, asthma, Crohn's disease, diabetes, graft rejection, graft-versus-host disease, Hashimoto's thyroiditis, hemolytic uremic syndrome, HIV-related diseases, lupus erythematosus, multiple sclerosis, polyarteritis nodosa, polyarthritis, psoriasis, psoriatic arthritis, rheumatoid arthritis, scleroderma, septic shock, Sjorgren's syndrome, ulcerative colitis, and/or vasculitis.

[0466] It is within the scope of this disclosure to provide a prophylaxis or treatment for diseases or conditions mediated by B-cells and/or T-cells by administering the CD20-binding molecule as described herein and/or a composition thereof, to a patient for the purpose of killing B-cells and/or T-cells in the patient. This usage is compatible with preparing or conditioning a patient for bone marrow transplantation, stem cell transplantation, tissue transplantation, or organ transplantation, regardless of the source of the transplanted material, e.g., human or non-human sources.

[0467] It is within the scope as described herein to provide a bone marrow recipient for prophylaxis or treatment of host-versus-graft disease via the targeted CD20+ cell-killing of host T-cells using a CD20-binding molecule as described herein and/or a composition thereof.

[0468] The CD20-binding molecule as described herein and/or a composition thereof may be utilized in a method of treating cancer comprising administering to a patient, in need thereof, a therapeutically effective amount of the protein composition or a pharmaceutical composition as described herein. For certain embodiments of the methods as described herein, the condition, disease, or disorder being treated is related to hematologic diseases, rheumatic diseases, hematologic cancers, leukemias, lymphomas, melanomas, myelomas, B-cell lymphomas, B-cell non-Hodgkins lymphomas (B-cell NHL), Burkitt's lymphomas (BL), B-cell chronic lymphocytic leukemias (B-cell CLL), chronic lymphocytic leukemias (CLL), diffuse large B-cell lymphomas (DLBCL or DLBL), follicular lymphomas (FL), hairy cell leukemias (HCL), Hodgkins lymphomas (HD), immunoblastic large cell lymphomas, mantle cell lymphomas (MCL), melanomas, non-Hodgkins lymphomas (NHL), precursor B-lymphoblastic lymphomas (B-LBL), small lymphocytic lymphoma (SLL), and T-cell lymphomas (TCL), amyloidosis, ankylosing spondylitis, asthma, Crohn's disease, diabetes, graft rejection, graft-versus-host disease, Hashimoto's thyroiditis, hemolytic uremic syndrome, HIV-related diseases, lupus erythematosus, multiple sclerosis, polyarteritis nodosa, polyarthritis, psoriasis, psoriatic arthritis, rheumatoid arthritis, scleroderma, septic shock, Sjorgren's syndrome, ulcerative colitis, and/or vasculitis.

[0469] Non-limiting examples of subtypes of hematologic cancers (e.g. leukemias, lymphomas, and myelomas) that may be treated with the CD20-binding molecules and compositions as described herein include acute myeloid leukemias (acute myelogenous leukemia or AML), acute non-lymphocytic leukemias, B-cell lymphomas, B-cell non-Hodgkin's lymphomas (B-cell NHL), B-cell acute lymphoblastic leukemias (B-ALL or BCP-ALL), B-cell prolymphocytic leukemias (B-PLL), B-lymphoblastic lymphomas (B-LBL), Burkitt's lymphomas (BL), atypical Burkitt's lymphomas (atypical BL), chronic lymphocytic leukemias (CLL), chronic myeloid leukemias (CML), cutaneous B-cell lymphomas (CBCL), diffuse large B-cell lymphomas (DLBCL or DLBL), follicular lymphomas (FL), hairy cell leukemias (HCL), heavy chain diseases, Hodgkin's lymphomas (HL or HD), immunoblastic large cell lymphomas, granulomatosis (LG or LYG), lymphoplasmacytic lymphomas, mantle cell lymphomas (MCL), marginal zone lymphomas (MZL), multiple myelomas (MM), nodular lymphocyte predominant Hodgkin's lymphomas (NLPHL), non-Hodgkin's lymphomas (NHL), plasmablastic lymphomas (PBL), plasmablastic lymphomas associated with multicentric Castleman disease, plasma cell neoplasmas, plasma cell myelomas, primary effusion lymphomas (PEL), small lymphocytic lymphomas (SLL), T-cell large granular lymphocyte leukemias (T-LGLL), T-cell lymphomas (TCL), peripheral T-cell lymphomas (PTCL), T-cell prolymphocytic leukemias (T-PLL), mycosis fungiodes (MF), and Waldenström's macroglobulinemias (WM).

[0470] The CD20-binding molecule as described herein and/or a composition thereof may be utilized in a method of treating an immune disorder comprising administering to a patient, in need thereof, a therapeutically effective amount of the CD20-binding molecule as described herein and/or a composition thereof. For certain embodiments of the methods as described herein, the immune disorder is related to an inflammation associated with a disease such as amyloidosis, ankylosing spondylitis, asthma, Crohn's disease, diabetes, graft rejection, graft-versus-host disease, Graves' disease, Graves' ophthalmopathy, Hashimoto's thyroiditis, heavy chain disease, hemolytic uremic syndrome, HIV-related diseases, lupus erythematosus, multiple sclerosis, neuromyelitis optica spectrum disorders, N-methyl D-aspartate (NMDA) receptor encephalitis, opsoclonus myoclonus syndrome (OMS), paroxysmal nocturnal hemoglobinuria, polyarteritis nodosa, polyarthritis, psoriasis, psoriatic arthritis, rheumatoid arthritis, scleritis, scleroderma, septic shock, Sjorgren's syndrome, ulcerative colitis, or vasculitis.

[0471] Among certain embodiments as described herein is using the CD20-binding molecule as described herein and/or a composition thereof or a solvate or salt as described herein as a component of a pharmaceutical composition or medicament for the treatment or prevention of a cancer, tumor, immune disorder, and/or growth abnormality involving a CD20+ cell. For example, immune disorders presenting on the skin of a patient may be treated with such a medicament in efforts to reduce inflammation. In another example, skin tumors may be treated with such a medicament in efforts to reduce tumor size or eliminate the tumor completely.

[0472] For certain cancers, depletion and/or inhibition of B-cells generally may improve disease outcomes, such as, e.g. by depleting cancer escape promoting regulatory B-cells (see e.g. Olkhanud P et al., Cancer Res 69: 5996-6004 (2009); Olkhanud P et al., Cancer Res 71: 3505-15 (2011)).

[0473] Among certain embodiments as described herein are methods of inducing cellular internalization of a CD20-binding molecule into a cell(s) and/or internalizing a cell surface localized CD20 bound by a CD20-binding molecule as described herein, the method comprising the step of contacting the cell(s) with a CD20-binding molecule as described herein, a CD20-binding molecule composition as described herein, a solvate as described herein, a salt as described herein, a pharmaceutical composition as described herein, and/or a diagnostic composition as described herein. For certain embodiments of this inducing internalization method, the cell(s) is physically coupled with CD20, which have the extracellular part bound by two or more CD20 binding regions of the CD20-binding molecule. In some embodiments of the inducing cellular internalization method, the step of contacting the cell(s) occurs in vitro. For certain other embodiments, the step of contacting the cell(s) occurs in vivo, such as, e.g., within a patient. In some embodiments of the inducing cellular internalization method, the cellular internalization of the CD20-binding molecule occurs in about five hours, four hours, three hours, two hours, one hour, thirty minutes, or less at a physiological temperature appropriate for the cell and/or at about 37 degrees Celsius. In some embodiments, the cell expresses at a cellular surface the CD20 which (1) have the extracellular part bound by the two or more CD20 binding regions of the CD20-binding molecule, (2) have a transmembrane domain, and (3) remain physically coupled to the cell. In some embodiments, the cell is a CD20 positive cell. In some embodiments, the cell is physically coupled with a significant amount of extracellular CD20 which (1) have the extracellular part bound by the two or more CD20 binding regions of the CD20-binding molecule. In some embodiments, the cell is a descendant or member of a B-cell lineage. In some embodiments, the cell is a malignant B-cell, B-cell leukemia cell, B-cell lymphoma cell, B-cell myeloma cell, acute myeloid leukemia cell, acute non-lymphocytic leukemia cell, B-cell chronic lymphocytic leukemia cell, B-cell lymphoma cell, B-cell non-Hodgkin's lymphoma cell, B-cell precursor acute lymphoblastic leukemia cell, B-cell prolymphocytic leukemia cell, Burkitt's lymphoma cell, chronic lymphocytic leukemia cell, chronic myeloid leukemia cell, diffuse large B-cell lymphoma cell, follicular lymphoma cell, hairy cell leukemia cell, Hodgkin's lymphoma cell, immunoblastic large cell lymphoma cell, mantle cell lymphoma cell, melanoma cell, multiple myeloma cell, neoplastic plasma cell, nodular lymphocyte predominant Hodgkin's lymphoma cell, non-Hodgkin's lymphoma cell, plasmablastic lymphoma cell, plasma cell myeloma cell, precursor B-lymphoblastic lymphoma cell, small lymphocytic lymphoma cell, malignant T-cell, T-cell leukemia cell, T-cell lymphoma cell, T-cell large granular lymphocyte leukemia cell, T-cell prolymphocytic leukemia, healthy B-cell lineage cell, or healthy T-cell.

[0474] In some embodiments, the methods as described herein provide a method of inducing cellular internalization of a cell surface localized CD20 bound by a CD20-binding molecule in a patient, the method comprising the step of administering to the patient a CD20-binding molecule as described herein, a solvate as described herein, a salt as described herein, a CD20-binding molecule composition as described herein, pharmaceutical composition as described herein, and/or a diagnostic composition as described herein.

[0475] Additionally, provided herein are methods for delivering an exogenous material to the inside of a cell, the method comprising the step of contacting the cell(s), either in vitro or in vivo, with a CD20-binding molecule as described herein which comprises an additional exogenous material, a CD20-binding molecule composition as described herein comprising a CD20-binding molecule as described herein which comprises an additional exogenous material, a solvate as described herein comprising a CD20-binding molecule as described herein which comprises an additional exogenous material, a salt as described herein comprising a CD20-binding molecule as described herein which comprises an additional exogenous material, a pharmaceutical composition as described herein comprising a CD20-binding molecule as described herein which comprises an additional exogenous material, and/or a diagnostic composition as described herein comprising a CD20-binding molecule as described herein which comprises an additional exogenous material. In some embodiments, the cell is physically coupled with CD20 which have the extracellular part bound by two or more CD20 binding regions of the CD20-binding molecule. In some embodiments, the cell expresses at a cellular surface the CD20 which (1) have the extracellular part bound by the two or more CD20 binding regions of the CD20-binding molecule, (2) have a transmembrane domain, and (3) remain physically coupled to the cell. In some embodiments, the cell is a CD20 positive cell. For certain embodiments, the cell is physically coupled with a significant amount of extracellular CD20 which (1) have the extracellular part bound by the two or more CD20 binding regions of the CD20-binding molecule. For certain embodiments, the cell is a descendant or member of a B-cell lineage. For certain embodiments, the cell is a malignant B-cell, B-cell leukemia cell, B-cell lymphoma cell, B-cell myeloma cell, acute myeloid leukemia cell, acute non-lymphocytic leukemia cell, B-cell chronic lymphocytic leukemia cell, B-cell lymphoma cell, B-cell non-Hodgkin's lymphoma cell, B-cell precursor acute lymphoblastic leukemia cell, B-cell prolymphocytic leukemia cell, Burkitt's lymphoma cell, chronic lymphocytic leukemia cell, chronic myeloid leukemia cell, diffuse large B-cell lymphoma cell, follicular lymphoma cell, hairy cell leukemia cell, Hodgkin's lymphoma cell, immunoblastic large cell lymphoma cell, mantle cell lymphoma cell, melanoma cell, multiple myeloma cell, neoplastic plasma cell, nodular lymphocyte predominant Hodgkin's lymphoma cell, non-Hodgkin's lymphoma cell, plasmablastic lymphoma cell, plasma cell myeloma cell, precursor B-lymphoblastic lymphoma cell, small lymphocytic lymphoma cell, malignant T-cell, T-cell leukemia cell, T-cell lymphoma cell, T-cell large granular lymphocyte leukemia cell, T-cell prolymphocytic leukemia, healthy B-cell lineage cell, or healthy T-cell.

[0476] For certain embodiments, a method of delivering an exogenous material (e.g., a detection promoting agent for collecting diagnostic information) to the inside of a cell in a patient is provided, the method comprising the step of administering to the patient a CD20-binding molecule as described herein which comprises an additional exogenous material, a CD20-binding molecule composition as described herein comprising a CD20-binding molecule as described herein which comprises an additional exogenous material, a solvate as described herein comprising a CD20-binding molecule as described herein which comprises an additional exogenous material, a salt as described herein comprising a CD20-binding molecule as described herein which comprises an additional exogenous material, a pharmaceutical composition as described herein comprising a CD20-binding molecule as described herein which comprises an additional exogenous material, and/or a diagnostic composition as described herein comprising a CD20-binding molecule as described herein which comprises an additional exogenous material.

[0477] Also provided herein are various embodiments of CD20-binding molecules, and compositions thereof, wherein each CD20-binding molecule comprises 1) two or more CD20 binding regions, such as a binding region derived from an immunoglobulin, and 2) at least one Shiga toxin A Subunit effector polypeptide region derived from the A Subunit of at least one member of the Shiga toxin family. Each CD20 binding region of these multivalent CD20-binding molecules as described herein is capable of specifically binding an extracellular part of a CD20, such as, e.g., a part of a CD20 exposed to the extracellular environment when CD20 is expressed at a cellular surface by a cell and remains physically coupled to the cell.

[0478] The linking of multiple CD20 binding regions with one or more Shiga toxin A Subunit-derived polypeptides enables the engineering of CD20-targeting molecules that can promote rapid cellular internalization of cell-surface CD20 and thus efficiently enter the interiors of CD20-expressing cells. Therefore, certain multivalent CD20-binding molecules as described herein, and compositions thereof, are useful to selectively deliver cargo(s) to a CD20-expressing cell type(s) in the presence of one or more other cell types based on its CD20-targeting and cellular internalization activity(ies), such as, e.g., a cargo having a desired, intracellular function. In addition, certain CD20-binding molecules as described herein, and compositions thereof, are useful to selectively kill a CD20-expressing cell in the presence of one or more other cell types based on its CD20-targeting activity and cellular internalization activity(ies), such as, e.g., by delivering into the interior of the targeted, CD20-expressing cell a component of the CD20-binding molecule which is cytotoxic at an intracellular location. For example, certain CD20-binding molecules as described herein may be potently cytotoxic to CD20-expressing cells via their abilities to efficiently deliver into the interior of a CD20-expressing cell a catalytically active, Shiga toxin effector polypeptide(s) that is able to effectively route to the cytosol.

[0479] In some embodiments, the multivalent CD20-binding molecule as described herein comprises (1) two or more CD20 binding regions, each capable of specifically binding an extracellular part of a CD20 molecule; and (2) one or more Shiga toxin effector polypeptides derived from the amino acid sequence of the A Subunit of at least one member of the Shiga toxin family. In some embodiments, the multivalent CD20-binding molecule as described herein does not comprise an immunoglobulin Fc region or any immunoglobulin domain required for an extracellular mechanism(s) of cell killing other than a domain(s) required for antigen binding. In some embodiments, the multivalent CD20-binding molecule does not comprise any immunoglobulin domains other than 1) one or more heavy chain variable domains, (2) one or more heavy chain variable domains and one or more light chain variable domains, (3) six or more CDRs, and/or (4) one or more single-chain variable fragments. In some embodiments, the CD20-binding molecule as described herein comprises only two, Shiga toxin effector polypeptides.

[0480] In some embodiments, the multivalent CD20-binding molecule as described herein comprises (1) two or more CD20 binding regions, each capable of specifically binding an extracellular part of a CD20 molecule; and (2) one or more Shiga toxin effector regions, each comprising a polypeptide derived from the amino acid sequence of the A Subunit of at least one member of the Shiga toxin family. In some embodiments, the multivalent CD20-binding molecule as described herein comprises (1) two or more CD20 binding regions, each capable on its own of specifically binding an extracellular part of a CD20 molecule; and (2) one or more Shiga toxin effector regions, each comprising a polypeptide derived from the amino acid sequence of the A Subunit of at least one member of the Shiga toxin family. In some embodiments, the multivalent CD20-binding molecule as described herein does not comprise an immunoglobulin Fc region or any immunoglobulin domain required for an extracellular mechanism(s) of cell killing other than a domain(s) required for antigen binding. In some embodiments, the multivalent CD20-binding molecule does not comprise any immunoglobulin domains other than 1) one or more heavy chain variable domains, (2) one or more heavy chain variable domains and one or more light chain variable domains, (3) six or more CDRs, and/or (4) one or more single-chain variable fragments. In some embodiments, the CD20-binding molecule as described herein comprises only two, Shiga toxin effector polypeptides.

[0481] For certain embodiments of the multivalent CD20-binding molecule as described herein, upon administration of the multivalent CD20-binding molecule to a cell physically coupled with CD20, which have the extracellular part bound by two or more CD20 binding regions of the multivalent CD20-binding molecule, results in one or more of the following: (1) internalizing the multivalent CD20-binding molecule inside the cell, (2) subcellular routing of a Shiga toxin effector polypeptide of the multivalent CD20-binding molecule to the cell's cytosol, (3) disrupting the cell's ribosome function, and (4) killing of the cell. In some embodiments, the internalizing occurs in about five hours, four hours, three hours, two hours, one hour, thirty minutes, or less at a physiological temperature appropriate for the cell and/or at about 37 degrees Celsius. In some embodiments, the multivalent CD20-binding molecule induces cellular internalization of a molecular complex comprising the multivalent CD20-binding molecule bound to CD20. In some embodiments, the cell expresses at a cellular surface the CD20 which (1) have the extracellular part bound by the two or more CD20 binding regions of the multivalent CD20-binding molecule, (2) have a transmembrane domain, and (3) remain physically coupled to the cell. In some embodiments, the cell is a CD20 positive cell. For certain embodiments, the cell is physically coupled with a significant amount of extracellular CD20 which (1) have the extracellular part bound by the two or more CD20 binding regions of the multivalent CD20-binding molecule. For certain embodiments, the cell is a descendant or member of a B-cell lineage. For certain embodiments, the cell is a malignant B-cell, B-cell leukemia cell, B-cell lymphoma cell, B-cell myeloma cell, acute myeloid leukemia cell, acute non-lymphocytic leukemia cell, B-cell chronic lymphocytic leukemia cell, B-cell lymphoma cell, B-cell non-Hodgkin's lymphoma cell, B-cell precursor acute lymphoblastic leukemia cell, B-cell prolymphocytic leukemia cell, Burkitt's lymphoma cell, chronic lymphocytic leukemia cell, chronic myeloid leukemia cell, diffuse large B-cell lymphoma cell, follicular lymphoma cell, hairy cell leukemia cell, Hodgkin's lymphoma cell, immunoblastic large cell lymphoma cell, mantle cell lymphoma cell, melanoma cell, multiple myeloma cell, neoplastic plasma cell, nodular lymphocyte predominant Hodgkin's lymphoma cell, non-Hodgkin's lymphoma cell, plasmablastic lymphoma cell, plasma cell myeloma cell, precursor B-lymphoblastic lymphoma cell, small lymphocytic lymphoma cell, malignant T-cell, T-cell leukemia cell, T-cell lymphoma cell, T-cell large granular lymphocyte leukemia cell, T-cell prolymphocytic leukemia, healthy B-cell lineage cell, or healthy T-cell.

[0482] For certain embodiments of the multivalent CD20-binding molecule as described herein, upon administration of the multivalent CD20-binding molecule to a cell physically coupled with CD20, which have the extracellular part bound by two or more CD20 binding regions of the multivalent CD20-binding molecule, results in one or more of the following: (1) internalizing the multivalent CD20-binding molecule inside the cell, (2) subcellular routing of a Shiga toxin effector region of the multivalent CD20-binding molecule to the cell's cytosol, (3) disrupting the cell's ribosome function, and (4) killing of the cell. In some embodiments, the internalizing occurs in about five hours, four hours, three hours, two hours, one hour, thirty minutes, or less at a physiological temperature appropriate for the cell and/or at about 37 degrees Celsius. In some embodiments, the CD20-binding molecule induces cellular internalization of a molecular complex comprising the CD20-binding molecule bound to CD20. In some embodiments, the cell expresses at a cellular surface the CD20 which (1) have the extracellular part bound by the two or more CD20 binding regions of the CD20-binding molecule, (2) have a transmembrane domain, and (3) remain physically coupled to the cell. In some embodiments, the cell is a CD20 positive cell. For certain embodiments, the cell is physically coupled with a significant amount of extracellular CD20 which (1) have the extracellular part bound by the two or more CD20 binding regions of the CD20-binding molecule. For certain embodiments, the cell is a descendant or member of a B-cell lineage. For certain embodiments, the cell is a malignant B-cell, B-cell leukemia cell, B-cell lymphoma cell, B-cell myeloma cell, acute myeloid leukemia cell, acute non-lymphocytic leukemia cell, B-cell chronic lymphocytic leukemia cell, B-cell lymphoma cell, B-cell non-Hodgkin's lymphoma cell, B-cell precursor acute lymphoblastic leukemia cell, B-cell prolymphocytic leukemia cell, Burkitt's lymphoma cell, chronic lymphocytic leukemia cell, chronic myeloid leukemia cell, diffuse large B-cell lymphoma cell, follicular lymphoma cell, hairy cell leukemia cell, Hodgkin's lymphoma cell, immunoblastic large cell lymphoma cell, mantle cell lymphoma cell, melanoma cell, multiple myeloma cell, neoplastic plasma cell, nodular lymphocyte predominant Hodgkin's lymphoma cell, non-Hodgkin's lymphoma cell, plasmablastic lymphoma cell, plasma cell myeloma cell, precursor B-lymphoblastic lymphoma cell, small lymphocytic lymphoma cell, malignant T-cell, T-cell leukemia cell, T-cell lymphoma cell, T-cell large granular lymphocyte leukemia cell, T-cell prolymphocytic leukemia, healthy B-cell lineage cell, or healthy T-cell.

[0483] For certain embodiments of the CD20-binding molecule as described herein, upon administration of the CD20-binding molecule to a plurality of cells physically coupled with CD20, which have the extracellular part bound by two or more CD20 binding regions of the CD20-binding molecule, results in one or more of the following activities: (1) internalizing the CD20-binding molecule inside the cell, (2) subcellular routing of a Shiga toxin effector polypeptide of the CD20-binding molecule to the cell's cytosol, (3) disrupting the cell's ribosome function, and (4) killing of the cell. In some embodiments, the CD20-binding molecule induces cellular internalization of a molecular complex comprising the CD20-binding molecule bound to CD20. In some embodiments, upon administration of the CD20-binding molecule to a plurality of cells physically coupled with CD20, which have the extracellular part bound by two or more CD20 binding regions of the multivalent CD20-binding molecule, at a concentration of multivalent CD20-binding molecule equivalent to five or thirty-eight percent to fifty percent cell-surface occupancy, the majority of the multivalent CD20-binding molecule internalizes into the plurality of cells in about five hours, four hours, three hours, two hours, one hour, thirty minutes, or less at a physiological temperature appropriate for the cell and/or at about 37 degrees Celsius. In some embodiments, members of the plurality of cells express at a cellular surface the CD20 which (1) have the extracellular part bound by the two or more CD20 binding regions of the multivalent CD20-binding molecule, (2) have a transmembrane domain, and (3) remain physically coupled to the cell. In some embodiments, members of the plurality of cells are CD20 positive cells. For certain embodiments, the members of the plurality of cells are physically coupled with a significant amount of extracellular CD20 which (1) have the extracellular part bound by the two or more CD20 binding regions of the multivalent CD20-binding molecule. For certain embodiments, members of the plurality of cells are descendants or members of a B-cell lineage. For certain embodiments, members of the plurality of cells are s malignant B-cell, B-cell leukemia cell, B-cell lymphoma cell, B-cell myeloma cell, acute myeloid leukemia cell, acute non-lymphocytic leukemia cell, B-cell chronic lymphocytic leukemia cell, B-cell lymphoma cell, B-cell non-Hodgkin's lymphoma cell, B-cell precursor acute lymphoblastic leukemia cell, B-cell prolymphocytic leukemia cell, Burkitt's lymphoma cell, chronic lymphocytic leukemia cell, chronic myeloid leukemia cell, diffuse large B-cell lymphoma cell, follicular lymphoma cell, hairy cell leukemia cell, Hodgkin's lymphoma cell, immunoblastic large cell lymphoma cell, mantle cell lymphoma cell, melanoma cell, multiple myeloma cell, neoplastic plasma cell, nodular lymphocyte predominant Hodgkin's lymphoma cell, non-Hodgkin's lymphoma cell, plasmablastic lymphoma cell, plasma cell myeloma cell, precursor B-lymphoblastic lymphoma cell, small lymphocytic lymphoma cell, malignant T-cell, T-cell leukemia cell, T-cell lymphoma cell, T-cell large granular lymphocyte leukemia cell, T-cell prolymphocytic leukemia, healthy B-cell lineage cell, or healthy T-cell members.

[0484] For certain embodiments of the multivalent CD20-binding molecule as described herein, upon administration of the multivalent CD20-binding molecule to a plurality of cells physically coupled with CD20, which have the extracellular part bound by two or more CD20 binding regions of the multivalent CD20-binding molecule, results in one or more of the following activities: (1) internalizing the multivalent CD20-binding molecule inside the cell, (2) subcellular routing of a Shiga toxin effector region of the multivalent CD20-binding molecule to the cell's cytosol, (3) disrupting the cell's ribosome function, and (4) killing of the cell. In some embodiments, the multivalent CD20-binding molecule induces cellular internalization of a molecular complex comprising the multivalent CD20-binding molecule bound to CD20. In some embodiments, upon administration of the multivalent CD20-binding molecule to a plurality of cells physically coupled with CD20, which have the extracellular part bound by two or more CD20 binding regions of the multivalent CD20-binding molecule, at a concentration of multivalent CD20-binding molecule equivalent to five or thirty-eight percent to fifty percent cell-surface occupancy, the majority of the multivalent CD20-binding molecule internalizes into the plurality of cells in about five hours, four hours, three hours, two hours, one hour, thirty minutes, or less at a physiological temperature appropriate for the cell and/or at about 37 degrees Celsius. In some embodiments, members of the plurality of cells express at a cellular surface the CD20 which (1) have the extracellular part bound by the two or more CD20 binding regions of the multivalent CD20-binding molecule, (2) have a transmembrane domain, and (3) remain physically coupled to the cell. In some embodiments, members of the plurality of cells are CD20 positive cells. For certain embodiments, the members of the plurality of cells are physically coupled with a significant amount of extracellular CD20 which (1) have the extracellular part bound by the two or more CD20 binding regions of the CD20-binding molecule. For certain embodiments, members of the plurality of cells are descendants or members of a B-cell lineage. For certain embodiments, members of the plurality of cells are malignant B-cell, B-cell leukemia cell, B-cell lymphoma cell, B-cell myeloma cell, acute myeloid leukemia cell, acute non-lymphocytic leukemia cell, B-cell chronic lymphocytic leukemia cell, B-cell lymphoma cell, B-cell non-Hodgkin's lymphoma cell, B-cell precursor acute lymphoblastic leukemia cell, B-cell prolymphocytic leukemia cell, Burkitt's lymphoma cell, chronic lymphocytic leukemia cell, chronic myeloid leukemia cell, diffuse large B-cell lymphoma cell, follicular lymphoma cell, hairy cell leukemia cell, Hodgkin's lymphoma cell, immunoblastic large cell lymphoma cell, mantle cell lymphoma cell, melanoma cell, multiple myeloma cell, neoplastic plasma cell, nodular lymphocyte predominant Hodgkin's lymphoma cell, non-Hodgkin's lymphoma cell, plasmablastic lymphoma cell, plasma cell myeloma cell, precursor B-lymphoblastic lymphoma cell, small lymphocytic lymphoma cell, malignant T-cell, T-cell leukemia cell, T-cell lymphoma cell, T-cell large granular lymphocyte leukemia cell, T-cell prolymphocytic leukemia, healthy B-cell lineage cell, or healthy T-cell members.

[0485] For certain embodiments of the multivalent CD20-binding molecule as described herein, administration of the multivalent CD20-binding molecule to a CD20-expressing cell, the multivalent CD20-binding molecule is capable of causing death of the cell, i.e. killing the cell. For certain embodiments of the multivalent CD20-binding molecule as described herein, upon administration of the multivalent CD20-binding molecule to a CD20-expressing cell expressing CD20 having the extracellular part bound by two or more CD20 binding regions of the multivalent CD20-binding molecule, the multivalent CD20-binding molecule is capable of causing death of the cell. In some embodiments, the cell express at a cellular surface the CD20 which (1) have the extracellular part bound by the two or more CD20 binding regions of the multivalent CD20-binding molecule, (2) have a transmembrane domain, and (3) remain physically coupled to the cell. In some embodiments, the cell is a CD20 positive cell. In some embodiments, the cell is physically coupled with a significant amount of extracellular CD20 which (1) have the extracellular part bound by the two or more CD20 binding regions of the multivalent CD20-binding molecule. This cell killing activity may or may not depend on the catalytic activity of one or more Shiga toxin effector regions (e.g. Shiga toxin effector polypeptides) of the multivalent CD20-binding molecule.

[0486] For certain embodiments of the multivalent CD20-binding molecule as described herein, upon administration of the multivalent CD20-binding molecule to a first population of cells physically coupled to CD20, and a second population of cells, a cytotoxic effect of the multivalent CD20-binding molecule to members of said first population of cells relative to members of said second population of cells is at least 3-fold greater. In some embodiments, members of the first population of cells express at a cellular surface the CD20 which (1) have the extracellular part bound by the two or more CD20 binding regions of the multivalent CD20-binding molecule, (2) have a transmembrane domain, and (3) remain physically coupled to the cell. In some embodiments, members of the first population of cells are CD20 positive cells. For certain embodiments, the members of the first population of cells are physically coupled with a significant amount of extracellular CD20 which (1) have the extracellular part bound by the two or more CD20 binding regions of the multivalent CD20-binding molecule. For certain embodiments, members of the first population of cells over-express, at a cellular surface, CD20 which have the extracellular part bound by the two or more CD20 binding regions of the multivalent CD20-binding molecule. For certain embodiments, members of the first population of cells over-express CD20 which (1) have the extracellular part bound by the two or more CD20 binding regions of the multivalent CD20-binding molecule, (2) have a transmembrane domain, and (3) remain physically coupled to the cell. For certain embodiments, members of the first population of cells are descendants or members of a B-cell lineage. For certain embodiments, members of the first population of cells are malignant B-cell, B-cell leukemia cell, B-cell lymphoma cell, B-cell myeloma cell, acute myeloid leukemia cell, acute non-lymphocytic leukemia cell, B-cell chronic lymphocytic leukemia cell, B-cell lymphoma cell, B-cell non-Hodgkin's lymphoma cell, B-cell precursor acute lymphoblastic leukemia cell, B-cell prolymphocytic leukemia cell, Burkitt's lymphoma cell, chronic lymphocytic leukemia cell, chronic myeloid leukemia cell, diffuse large B-cell lymphoma cell, follicular lymphoma cell, hairy cell leukemia cell, Hodgkin's lymphoma cell, immunoblastic large cell lymphoma cell, mantle cell lymphoma cell, melanoma cell, multiple myeloma cell, neoplastic plasma cell, nodular lymphocyte predominant Hodgkin's lymphoma cell, non-Hodgkin's lymphoma cell, plasmablastic lymphoma cell, plasma cell myeloma cell, precursor B-lymphoblastic lymphoma cell, small lymphocytic lymphoma cell, malignant T-cell, T-cell leukemia cell, T-cell lymphoma cell, T-cell large granular lymphocyte leukemia cell, T-cell prolymphocytic leukemia, healthy B-cell lineage cell, or healthy T-cell members. For certain embodiments, the members of the second population of cells are not physically coupled with extracellular CD20 and/or are CD20 negative. For certain embodiments, the members of the second population of cells are not physically coupled with extracellular CD20 which (1) have the extracellular part bound by the two or more CD20 binding regions of the multivalent CD20-binding molecule. In some embodiments, members of the second population of cells express at a cellular surface the CD20 which (1) have the extracellular part bound by the two or more CD20 binding regions of the multivalent CD20-binding molecule, (2) have a transmembrane domain, and (3) remain physically coupled to the cell. For certain embodiments, the members of the second population of cells are not physically coupled with a significant amount of extracellular CD20 which (1) have the extracellular part bound by the two or more CD20 binding regions of the multivalent CD20-binding molecule. For certain embodiments of the multivalent CD20-binding molecule as described herein, upon administration of the multivalent CD20-binding molecule to a first population of cells whose members are CD20 positive, and a second population of cells whose members are not CD20 positive, a cytotoxic effect of the multivalent CD20-binding molecule to members of said first population of cells relative to members of said second population of cells is at least 3-fold greater.

[0487] In some embodiments, the multivalent CD20-binding molecule as described herein comprises two or more proteinaceous components (e.g. protein subunits), wherein each proteinaceous component comprises (1) at least one CD20 binding region capable of specifically binding an extracellular part of a CD20 molecule, and, optionally, (2) one or more Shiga toxin effector polypeptides, each comprising a polypeptide derived from the amino acid sequence of the A Subunit of at least one member of the Shiga toxin family. In some embodiments, each proteinaceous component comprises (1) only one CD20 binding region capable of specifically binding an extracellular part of a CD20 molecule, and (2) only one Shiga toxin effector polypeptide. In some embodiments, the multivalent CD20-binding molecule as described herein comprises exactly two proteinaceous components. In some embodiments, the multivalent CD20-binding molecule as described herein comprises two or more components, wherein at least one component is associated with the multivalent CD20-binding molecule through one or more non-covalent interactions. In some embodiments, at least one of the components is proteinaceous. In some embodiments, the multivalent CD20-binding molecule as described herein comprises two or more proteinaceous components associated with each other, either directly or indirectly, through one or more non-covalent interactions. In some embodiments, each proteinaceous component comprises (1) at least one CD20 binding region capable of specifically binding an extracellular part of a CD20, and (2) a Shiga toxin effector polypeptide.

[0488] In some embodiments, the multivalent CD20-binding molecule as described herein comprises two or more proteinaceous components (e.g. protein subunits), wherein each proteinaceous component comprises (1) at least one CD20 binding region capable of specifically binding an extracellular part of a CD20 molecule, and, optionally, (2) one or more Shiga toxin effector regions, each comprising a polypeptide derived from the amino acid sequence of the A Subunit of at least one member of the Shiga toxin family. In some embodiments, each proteinaceous component comprises (1) only one CD20 binding region capable of specifically binding an extracellular part of a CD20 molecule, and (2) only one Shiga toxin effector region. In some embodiments, the multivalent CD20-binding molecule as described herein comprises exactly two proteinaceous components. In some embodiments, the multivalent CD20-binding molecule as described herein comprises two or more components, wherein at least one component is associated with the multivalent CD20-binding molecule through one or more non-covalent interactions. In some embodiments, at least one of the components is proteinaceous. In some embodiments, the multivalent CD20-binding molecule as described herein comprises two or more proteinaceous components associated with each other, either directly or indirectly, through one or more non-covalent interactions. In some embodiments, each proteinaceous component comprises (1) at least one CD20 binding region capable of specifically binding an extracellular part of a CD20, and (2) a Shiga toxin effector region.

[0489] In some embodiments, the multivalent CD20-binding molecule as described herein comprises at least one CD20 binding region comprising an immunoglobulin-type binding region. In some embodiments, the multivalent CD20-binding molecule as described herein comprises the CD20 binding region comprising an immunoglobulin-type binding region comprising a polypeptide, the polypeptide being an autonomous V_{H} domain, single-domain antibody fragment (sdAb), nanobody, heavy chain-antibody domain derived from a camelid (V_{H}H or V_{H} domain fragment), heavy-chain antibody domain derived from a cartilaginous fish (V_{H}H or V_{H} domain fragment), immunoglobulin new antigen receptor (IgNAR), V_{NAR} fragment, single-chain variable fragment (scFv), antibody variable fragment (Fv), complementary determining region 3 fragment (CDR3), constrained FR3-CDR3-FR4 polypeptide (FR3-CDR3-FR4), Fd fragment, small modular immunopharmaceutical (SMIP) domain, antigen-binding fragment (Fab), Armadillo repeat polypeptide (ArmRP), fibronectin-derived 10^{th} fibronectin type III domain (10Fn3), tenascin type III domain (TNfn3), ankyrin repeat motif domain, low-density-lipoprotein-receptor-derived A-domain (LDLR-A), lipocalin (anticalin), Kunitz domain, Protein-A-derived Z domain, gamma-B crystalline-derived domain, ubiquitin-derived domain, Sac7d-derived polypeptide (affitin), Fyn-derived SH2 domain, miniprotein, C-type lectin-like domain scaffold or engineered antibody mimic, or any genetically manipulated counterpart of any of the foregoing which retains binding functionality.

[0490] In some embodiments, the multivalent CD20-binding molecule as described herein does not comprise an immunoglobulin Fc region or Fc region effector which retains an Fc region function, such as, e.g., involving extracellular signaling to immune system factors, cells, and/or tissues. Non-limiting examples of Fc region functions include activating T-cells, stimulating the release of inflammatory mediators such as cytokines like TNF-alpha, initiating complement dependent cytotoxicity (CDC), antibody-dependent cytotoxicity (ADCC), and phagocytosis of the cell bound extracellularly by the molecule comprising the Fc region.

[0491] In some embodiments, the multivalent CD20-binding molecule as described herein does not comprise any immunoglobulin heavy chain constant region, immunoglobulin light chain constant region, immunoglobulin C_{L} domain, immunoglobulin C_{H}1 domain, immunoglobulin C_{H}2 domain, and/or immunoglobulin C_{H}3 domain. In some embodiments, the multivalent CD20-binding molecule does not comprise any immunoglobulin domains other than the immunoglobulin domains selected from (1) CDR, (2) ABR, and/or (3) any immunoglobulin domain present in an autonomous V_{H} domain, single-domain antibody domains (sdAb), heavy-chain antibody domain fragment (V_{H}H fragments or V_{H} domain fragment), and single-chain variable fragment (scFv). In some embodiments, the multivalent CD20-binding molecule as described herein does not comprise any immunoglobulin domain or any polypeptide derived from an immunoglobulin.

[0492] In some embodiments, the multivalent CD20-binding molecule as described herein comprises at least one Shiga toxin effector polypeptide comprising, consisting essentially of, or consisting of the following polypeptide: (a) amino acids 75 to 251 of SEQ ID NO:1, SEQ ID NO:2, or SEQ ID NO:3; (b) amino acids 1 to 241 of SEQ ID NO:1, SEQ ID NO:2, or SEQ ID NO:3; (c) amino acids 1 to 251 of SEQ ID NO:1, SEQ ID NO:2, or SEQ ID NO:3; or (d) amino acids 1 to 261 of SEQ ID NO:1, SEQ ID NO:2, or SEQ ID NO:3.

[0493] In some embodiments, the multivalent CD20-binding molecule as described herein comprises at least one Shiga toxin effector region comprising, consisting essentially of, or consisting of the following polypeptide: (a) amino acids 75 to 251 of SEQ ID NO:1, SEQ ID NO:2, or SEQ ID NO:3; (b) amino acids 1 to 241 of SEQ ID NO:1, SEQ ID NO:2, or SEQ ID NO:3; (c) amino acids 1 to 251 of SEQ ID NO:1, SEQ ID NO:2, or SEQ ID NO:3; or (d) amino acids 1 to 261 of SEQ ID NO:1, SEQ ID NO:2, or SEQ ID NO:3.

[0494] In some embodiments, the multivalent CD20-binding molecule is monomeric. In some embodiments, the multivalent CD20-binding molecule is multimeric, e.g. the molecule comprises at least two, independent, polypeptide chains (e.g. protein subunits) associated either directly or indirectly to form a single molecule. In some embodiments, the multimeric CD20-binding molecule as described herein comprises two or more protein components, e.g., two or more individual CD20-binding proteins. In some embodiments, the multimeric CD20-binding molecule as described herein comprises two or more protein components (e.g. subunits) which are associated through one or more non-covalent interactions.

[0495] In some embodiments, the multimeric CD20-binding molecule as described herein comprises two or more proteins components (e.g. subunits) which are associated through one or more covalent interactions. In some embodiments, the multivalent CD20-binding molecule as described herein comprises two or more protein components, e.g., two or more individual CD20-binding proteins, which are associated through one or more covalent interactions, wherein at a least one covalent interaction is a disulfide bond between at least two of the protein components (e.g., between different protein subunits).

[0496] In some embodiments, the multivalent CD20-binding molecule as described herein comprises the molecule shown in any one of SEQ ID NOs: 1-304.

[0497] In some embodiments, the multivalent CD20-binding molecule as described herein comprises a CD20 binding region which comprises the immunoglobulin-type binding region comprising the following polypeptide(s): (a) a heavy chain variable (V_{H}) domain comprising (i) a HCDR1 comprising, consisting essentially of, or consisting of the amino acid sequence as shown in SEQ ID NO:5, SEQ ID NO:11, SEQ ID NO:17, SEQ ID NO:23, SEQ ID NO:29, or SEQ ID NO:35; (ii) a HCDR2 comprising, consisting essentially of, or consisting of the amino acid sequence as shown in SEQ ID NO:6, SEQ ID NO:12, SEQ ID NO:18, SEQ ID NO:24, SEQ ID NO:30, or SEQ ID NO:36; and/or (iii) a HCDR3 comprising, consisting essentially of, or consisting of the amino acid sequence as shown in SEQ ID NO:7, SEQ ID NO:13, SEQ ID NO:19, SEQ ID NO:25, SEQ ID NO:31, or SEQ ID NO:37; and/or (b) a light chain variable (V_{L}) domain comprising (i) a LCDR1 comprising, consisting essentially of, or consisting of the amino acid sequence as shown in SEQ ID NO:8, SEQ ID NO:14, SEQ ID NO:20, SEQ ID NO:26, SEQ ID NO:32, or SEQ ID NO:38; (ii) a LCDR2 comprising, consisting essentially of, or consisting of the amino acid sequence as shown in SEQ ID NO:9, SEQ ID NO:15, SEQ ID NO:21, SEQ ID NO:27, SEQ ID NO:33, or SEQ ID NO:39; and/or (iii) a LCDR3 comprising, consisting essentially of, or consisting of the amino acid sequence as shown in SEQ ID NO:10, SEQ ID NO:16, SEQ ID NO:22, SEQ ID NO:28, SEQ ID NO:34, or SEQ ID NO:40.

[0498] In some embodiments, a multivalent CD20-binding molecule as described herein comprises a CD20 binding region comprising, consisting essentially of, or consisting of amino acids 1-232, 1-233, 1-234, 1-235, 1-236, 1-242, 1-243, 1-244, 1-245, 1-246, 1-252, 1-253, 1-254, 1-255, or 1-256 of any one of SEQ ID NOs: 47-119 and 176-248.

[0499] In some embodiments, a CD20-binding molecule comprises the protein shown in any one of SEQ ID NOs: 47-304, and optionally, the protein further comprises an amino-terminal methionine residue. In some embodiments, a CD20-binding molecule is multivalent and comprises, consists essentially of, or consists of two proteins, each protein selected from any one of the polypeptides shown in SEQ ID NOs: 47-304, and optionally, each protein further comprises an amino-terminal methionine residue. In some embodiments, the protein is any one of the proteins having the sequence of SEQ ID NOs: 47-175 and further comprises a disulfide bond involving a cysteine residue at position 242, 482, 483, 484, 490, 491, 492, 493, 494, 495, 499, 500, 501, 502, 503, 504, 505, 510, 511, 512, 513 or 521.

[0500] In some embodiments, a CD20-binding molecule is multimeric and comprises, consists essentially of, or consists of: (a) two polypeptides selected from the polypeptides shown in SEQ ID NOs: 47-175 and 249-304, which each optionally may further comprise an amino-terminal methionine residue, and (b) a cysteine disulfide bond linking the two polypeptides, wherein the cysteine disulfide bond involves a cysteine residue in each of the two polypeptides located at amino acid position 242, 482, 483, 484, 490, 491, 492, 493, 494, 495, 499, 500, 501, 502, 503, 504, 505, 510, 511, 512, 513, or 521. In some embodiments, a multimeric CD20-binding molecule as described herein is a homodimer and consists essentially of: (a) two identical polypeptides, the polypeptides selected from one of the polypeptides shown in SEQ ID NOs: 47-175 and 249-304, and (b) a cysteine disulfide bond linking the two identical polypeptides, wherein the cysteine disulfide bond involves a cysteine residue in each of the two identical polypeptides located at amino acid position 242, 482, 483, 484, 490, 491, 492, 493, 494, 495, 499, 500, 501, 502, 503, 504, 505, 510, 511, 512, 513, or 521. In some embodiments, a multimeric CD20-binding molecule is a homodimer, wherein the two identical polypeptides are both the polypeptide shown in SEQ ID NO:49, and the amino acid position of the cysteine residue is 490. In some embodiments, a multivalent CD20-binding molecule is a homodimer, wherein the two identical polypeptides are both selected from the polypeptide shown in SEQ ID NO:50, SEQ ID NO:61, SEQ ID NO:73, SEQ ID NO:96, SEQ ID NO:101, or SEQ ID NO:102; and the amino acid position of the cysteine residue is 501. In some embodiments, a multivalent CD20-binding molecule is a homodimer, wherein the two identical polypeptides are both selected from the polypeptide shown in SEQ ID NO:53, SEQ ID NO:63, SEQ ID NO:66, SEQ ID NO:75, SEQ ID NO:83, SEQ ID NO:89, or SEQ ID NO:95; and the amino acid position of the cysteine residue is 512. In some embodiments, a CD20-binding molecule is a homodimer, wherein the two identical polypeptides are both the polypeptide shown in SEQ ID NO:54, and the amino acid position of the cysteine residue is 503. In some embodiments, a CD20-binding molecule is a homodimer, wherein the two identical polypeptides are both selected from the polypeptide shown in SEQ ID NO:55, SEQ ID NO:64, SEQ ID NO:67, SEQ ID NO:76, SEQ ID NO:90, SEQ ID NO:92, SEQ ID NO:93, SEQ ID NO:97, or SEQ ID NO:98; and the amino acid position of the cysteine residue is 502. In some embodiments, CD20-binding molecule is a homodimer, wherein the two identical polypeptides are both selected from the polypeptide shown in SEQ ID NO:56, SEQ ID NO:68, SEQ ID NO:91, SEQ ID NO:99, SEQ ID NO:103, or SEQ ID NO:104; and the amino acid position of the cysteine residue is 492. In some embodiments, a CD20-binding molecule is a homodimer, wherein the two identical polypeptides are both selected from the polypeptide shown in SEQ ID NO:54, SEQ ID NO:57, SEQ ID NO:69, SEQ ID NO:78, SEQ ID NO:82, SEQ ID NO:84, SEQ ID NO:87, SEQ ID NO:88, SEQ ID NO:94, SEQ ID NO:110, SEQ ID NO:111, or SEQ ID NO:115; and the amino acid position of the cysteine residue is 503. In some embodiments, a CD20-binding molecule is a homodimer, wherein the two identical polypeptides are both selected from the polypeptide shown in SEQ ID NO:58, SEQ ID NO:70, or SEQ ID NO:81; and the amino acid position of the cysteine residue is 493. In some embodiments, a CD20-binding molecule is a homodimer, wherein the two identical polypeptides are both selected from only the polypeptides shown in SEQ ID NOs: 249-304, and the amino acid position of the cysteine residue is 242.

[0501] In some embodiments, a CD20-binding molecule is monospecific for CD20-binding. In some embodiments, all the CD20 binding regions present in the CD20-binding molecule bind, on their own, the same extracellular part of the same CD20 (e.g. monoparatopic). In some embodiments, all the CD20 binding regions present in the CD20-binding molecule bind, on their own, the same extracellular CD20 epitope with equivalent specificities.

[0502] In some embodiments, the multivalent CD20-binding molecule comprises one or more monovalent CD20-binding molecule components; and whereby upon administration of the multivalent CD20-binding molecule as described herein to a population of cells physically coupled with CD20, which have the extracellular part bound by two or more CD20 binding regions of the multivalent CD20-binding molecule, the multivalent CD20-binding molecule exhibits a cytotoxic effect to the population of cells which is greater than a cytotoxic effect resulting from administration of an equivalent amount, mass, or molarity of any one of the monovalent CD20-binding molecule components of the multivalent CD20-binding molecule to a population of the same CD20 positive cells under same conditions by a factor of 1.33, 1.5, 1.75, 2, 3, 5, 7.5, 10, 20, 100, or greater than the change in CD20-binding valence between the monovalent CD20-binding component and the multivalent CD20-binding molecule. In some embodiments, members of the population of cells express at a cellular surface the CD20 which (1) have the extracellular part bound by the two or more CD20 binding regions of the multivalent CD20-binding molecule, (2) have a transmembrane domain, and (3) remain physically coupled to the cell. In some embodiments, members of the population of cells are CD20 positive cells. For certain embodiments, the members of the population of cells are physically coupled with a significant amount of extracellular CD20 which (1) have the extracellular part bound by the two or more CD20 binding regions of the multivalent CD20-binding molecule. For certain embodiments, members of the population of cells are descendants or members of a B-cell lineage. For certain embodiments, members of the population of cells are malignant B-cell, B-cell leukemia cell, B-cell lymphoma cell, B-cell myeloma cell, acute myeloid leukemia cell, acute non-lymphocytic leukemia cell, B-cell chronic lymphocytic leukemia cell, B-cell lymphoma cell, B-cell non-Hodgkin's lymphoma cell, B-cell precursor acute lymphoblastic leukemia cell, B-cell prolymphocytic leukemia cell, Burkitt's lymphoma cell, chronic lymphocytic leukemia cell, chronic myeloid leukemia cell, diffuse large B-cell lymphoma cell, follicular lymphoma cell, hairy cell leukemia cell, Hodgkin's lymphoma cell, immunoblastic large cell lymphoma cell, mantle cell lymphoma cell, melanoma cell, multiple myeloma cell, neoplastic plasma cell, nodular lymphocyte predominant Hodgkin's lymphoma cell, non-Hodgkin's lymphoma cell, plasmablastic lymphoma cell, plasma cell myeloma cell, precursor B-lymphoblastic lymphoma cell, small lymphocytic lymphoma cell, malignant T-cell, T-cell leukemia cell, T-cell lymphoma cell, T-cell large granular lymphocyte leukemia cell, T-cell prolymphocytic leukemia, healthy B-cell lineage cell, or healthy T-cell members. In some embodiments, the multivalent CD20-binding molecule as described herein comprises one or more monovalent CD20-binding molecule components; and whereby upon administration of the multivalent CD20-binding molecule as described herein to a population of CD20 positive cells expressing CD20 which have the extracellular part bound by two or more CD20 binding regions of the multivalent CD20-binding molecule, the multivalent CD20-binding molecule exhibits a cytotoxic effect which is greater than a cytotoxic effect resulting from administration of an equivalent amount, mass, or molarity of any one of the monovalent CD20-binding molecule components of the multivalent CD20-binding molecule to a population of the same CD20 positive cells under same conditions by a factor of 1.33, 1.5, 1.75, 2, 3, 5, 7.5, 10, 20, 100, or greater than the change in CD20-binding valence between the monovalent CD20-binding component and the multivalent CD20-binding molecule.

[0503] In some embodiments, the multivalent CD20-binding molecule as described herein comprises one or more monovalent CD20-binding molecule components; and whereby upon administration of the multivalent CD20-binding molecule as described herein to a population of cells physically coupled with CD20, which have the extracellular part bound by two or more CD20 binding regions of the multivalent CD20-binding molecule, the multivalent CD20-binding molecule exhibits a cytotoxic effect which is greater than a cytotoxic effect resulting from administration of an equivalent amount, mass, or molarity of any one of the monovalent CD20-binding molecule components of the multivalent CD20-binding molecule to a population of the same CD20 positive cells under same conditions by a factor of 1.33, 1.5, 1.75, 2, 3, 5, 7.5, 10, 20, 100, or greater than the change in equilibrium binding constants (K_{D}) between the multivalent CD20-binding molecule and the monovalent CD20-binding component for binding to CD20 or CD20-expressing cell. In some embodiments, members of the population of cells express at a cellular surface the CD20 which (1) have the extracellular part bound by the two or more CD20 binding regions of the multivalent CD20-binding molecule, (2) have a transmembrane domain, and (3) remain physically coupled to the cell. In some embodiments, members of the population of cells are CD20 positive cells. For certain embodiments, the members of the population of cells are physically coupled with a significant amount of extracellular CD20 which (1) have the extracellular part bound by the two or more CD20 binding regions of the multivalent CD20-binding molecule. For certain embodiments, members of the population of cells are descendants or members of a B-cell lineage. For certain embodiments, members of the population of cells are malignant B-cell, B-cell leukemia cell, B-cell lymphoma cell, B-cell myeloma cell, acute myeloid leukemia cell, acute non-lymphocytic leukemia cell, B-cell chronic lymphocytic leukemia cell, B-cell lymphoma cell, B-cell non-Hodgkin's lymphoma cell, B-cell precursor acute lymphoblastic leukemia cell, B-cell prolymphocytic leukemia cell, Burkitt's lymphoma cell, chronic lymphocytic leukemia cell, chronic myeloid leukemia cell, diffuse large B-cell lymphoma cell, follicular lymphoma cell, hairy cell leukemia cell, Hodgkin's lymphoma cell, immunoblastic large cell lymphoma cell, mantle cell lymphoma cell, melanoma cell, multiple myeloma cell, neoplastic plasma cell, nodular lymphocyte predominant Hodgkin's lymphoma cell, non-Hodgkin's lymphoma cell, plasmablastic lymphoma cell, plasma cell myeloma cell, precursor B-lymphoblastic lymphoma cell, small lymphocytic lymphoma cell, malignant T-cell, T-cell leukemia cell, T-cell lymphoma cell, T-cell large granular lymphocyte leukemia cell, T-cell prolymphocytic leukemia, healthy B-cell lineage cell, or healthy T-cell members. In some embodiments, the multivalent CD20-binding molecule as described herein comprises one or more monovalent CD20-binding molecule components; and whereby upon administration of the multivalent CD20-binding molecule as described herein to a population of CD20 positive cells expressing CD20 which have the extracellular part bound by two or more CD20 binding regions of the multivalent CD20-binding molecule, the multivalent CD20-binding molecule exhibits a cytotoxic effect which is greater than a cytotoxic effect resulting from administration of an equivalent amount, mass, or molarity of any one of the monovalent CD20-binding molecule components of the multivalent CD20-binding molecule to a population of the same CD20 positive cells under same conditions by a factor of 1.33, 1.5, 1.75, 2, 3, 5, 7.5, 10, 20, 100, or greater than the change in equilibrium binding constants (K_{D}) between the multivalent CD20-binding molecule and the monovalent CD20-binding component for binding to CD20 or CD20-expressing cell.

[0504] In some embodiments, the multivalent CD20-binding molecule as described herein comprises one or more monovalent CD20-binding molecule components; and whereby upon administration of the multivalent CD20-binding molecule as described herein to a population of cells physically coupled with CD20, which have the extracellular part bound by two or more CD20 binding regions of the multivalent CD20-binding molecule, the multivalent CD20-binding molecule exhibits a cytotoxic effect which is greater than a cytotoxic effect resulting from administration of an equivalent amount, mass, or molarity of any one of the monovalent CD20-binding molecule components of the multivalent CD20-binding molecule to a population of the same CD20 positive cells under same conditions by a factor of 1.33, 1.5, 1.75, 2, 3, 5, 7.5, 10, 20, 100, or greater than the change in affinity constant (1/K_{D}) between the multivalent CD20-binding molecule and the monovalent CD20-binding component for binding to CD20 or CD20-expressing cell. In some embodiments, members of the population of cells express at a cellular surface the CD20 which (1) have the extracellular part bound by the two or more CD20 binding regions of the multivalent CD20-binding molecule, (2) have a transmembrane domain, and (3) remain physically coupled to the cell. In some embodiments, members of the population of cells are CD20 positive cells. For certain embodiments, the members of the population of cells are physically coupled with a significant amount of extracellular CD20 which (1) have the extracellular part bound by the two or more CD20 binding regions of the multivalent CD20-binding molecule. For certain embodiments, members of the population of cells are descendants or members of a B-cell lineage. For certain embodiments, members of the population of cells are malignant B-cell, B-cell leukemia cell, B-cell lymphoma cell, B-cell myeloma cell, acute myeloid leukemia cell, acute non-lymphocytic leukemia cell, B-cell chronic lymphocytic leukemia cell, B-cell lymphoma cell, B-cell non-Hodgkin's lymphoma cell, B-cell precursor acute lymphoblastic leukemia cell, B-cell prolymphocytic leukemia cell, Burkitt's lymphoma cell, chronic lymphocytic leukemia cell, chronic myeloid leukemia cell, diffuse large B-cell lymphoma cell, follicular lymphoma cell, hairy cell leukemia cell, Hodgkin's lymphoma cell, immunoblastic large cell lymphoma cell, mantle cell lymphoma cell, melanoma cell, multiple myeloma cell, neoplastic plasma cell, nodular lymphocyte predominant Hodgkin's lymphoma cell, non-Hodgkin's lymphoma cell, plasmablastic lymphoma cell, plasma cell myeloma cell, precursor B-lymphoblastic lymphoma cell, small lymphocytic lymphoma cell, malignant T-cell, T-cell leukemia cell, T-cell lymphoma cell, T-cell large granular lymphocyte leukemia cell, T-cell prolymphocytic leukemia, healthy B-cell lineage cell, or healthy T-cell members. In some embodiments, the multivalent CD20-binding molecule as described herein comprises one or more monovalent CD20-binding molecule components; and whereby upon administration of the multivalent CD20-binding molecule as described herein to a population of CD20 positive cells expressing CD20 which have the extracellular part bound by two or more CD20 binding regions of the multivalent CD20-binding molecule, the multivalent CD20-binding molecule exhibits a cytotoxic effect which is greater than a cytotoxic effect resulting from administration of an equivalent amount, mass, or molarity of any one of the monovalent CD20-binding molecule components of the multivalent CD20-binding molecule to a population of the same CD20 positive cells under same conditions by a factor of 1.33, 1.5, 1.75, 2, 3, 5, 7.5, 10, 20, 100, or greater than the change in affinity constant (1/K_{D}) between the multivalent CD20-binding molecule and the monovalent CD20-binding component for binding to CD20 or CD20-expressing cell.

[0505] In some embodiments of the multivalent CD20-binding molecule as described herein, one or more polypeptide components of the CD20-binding molecule comprises a carboxy-terminal endoplasmic reticulum retention/retrieval signal motif of a member of the KDEL family. In some embodiments, the carboxy-terminal endoplasmic reticulum retention/retrieval signal motif has the sequence of: KDEL (SEQ ID NO:305), HDEF (SEQ ID NO:306), HDEL (SEQ ID NO:307), RDEF (SEQ ID NO:308), RDEL (SEQ ID NO:309), WDEL (SEQ ID NO:310), YDEL (SEQ ID NO:311), HEEF (SEQ ID NO:312), HEEL (SEQ ID NO:313), KEEL (SEQ ID NO:314), REEL (SEQ ID NO:315), KAEL (SEQ ID NO:316), KCEL (SEQ ID NO:317), KFEL (SEQ ID NO:318), KGEL (SEQ ID NO:319), KHEL (SEQ ID NO:320), KLEL (SEQ ID NO:321), KNEL (SEQ ID NO:322), KQEL (SEQ ID NO:323), KREL (SEQ ID NO:324), KSEL (SEQ ID NO:325), KVEL (SEQ ID NO:326), KWEL (SEQ ID NO:327), KYEL (SEQ ID NO:328), KEDL (SEQ ID NO:329), KIEL (SEQ ID NO:330), DKEL (SEQ ID NO:331), FDEL (SEQ ID NO:332), KDEF (SEQ ID NO:333), KKEL (SEQ ID NO:334), HADL (SEQ ID NO:335), HAEL (SEQ ID NO:336), HIEL (SEQ ID NO:337), HNEL (SEQ ID NO:338), HTEL (SEQ ID NO:339), KTEL (SEQ ID NO:340), HVEL (SEQ ID NO:341), NDEL (SEQ ID NO:342), QDEL (SEQ ID NO:343), REDL (SEQ ID NO:344), RNEL (SEQ ID NO:345), RTDL (SEQ ID NO:346), RTEL (SEQ ID NO:347), SDEL (SEQ ID NO:348), TDEL (SEQ ID NO:349), SKEL (SEQ ID NO:350), STEL (SEQ ID NO:351), or EDEL (SEQ ID NO:352).

[0506] In some embodiments of the multivalent CD20-binding molecule as described herein, one or more Shiga toxin effector polypeptides comprises a mutation relative to a naturally occurring A Subunit of a member of the Shiga toxin family that changes the enzymatic activity of the Shiga toxin effector polypeptide, the mutation selected from at least one amino acid residue deletion, insertion, or substitution, such as, e.g., A231E, R75A, Y77S, Y114S, E167D, R170A, R176K and/or W203A in SEQ ID NO:1, SEQ ID NO:2, SEQ ID NO:3, or SEQ ID NO:4. In some embodiments, the mutation is selected from at least one amino acid residue deletion, insertion, or substitution that reduces or eliminates catalytic activity but retains at least one other Shiga toxin effector function, such as, e.g., inducing cellular internalization and/or directing subcellular routing. In some embodiments, the mutation reduces or eliminates cytotoxicity of the Shiga toxin effecter polypeptide.

[0507] In some embodiments of the multivalent CD20-binding molecule as described herein, one or more Shiga toxin effector regions comprises a mutation relative to a naturally occurring A Subunit of a member of the Shiga toxin family that changes the enzymatic activity of the Shiga toxin effector region, the mutation selected from at least one amino acid residue deletion, insertion, or substitution, such as, e.g., A231E, R75A, Y77S, Y114S, E167D, R170A, R176K and/or W203A in SEQ ID NO:1, SEQ ID NO:2, SEQ ID NO:3, or SEQ ID NO:4. In some embodiments, the mutation is selected from at least one amino acid residue deletion, insertion, or substitution that reduces or eliminates catalytic activity but retains at least one other Shiga toxin effector function, such as, e.g., inducing cellular internalization and/or directing subcellular routing. In some embodiments, the mutation reduces or eliminates cytotoxicity of the Shiga toxin effecter region.

[0508] For certain embodiments of the multivalent CD20-binding molecule, the multivalent CD20-binding molecule may be utilized for the delivery of additional exogenous material into a cell. In some embodiments, the multivalent CD20-binding molecule as described herein comprises an additional exogenous material. For certain embodiments of the multivalent CD20-binding molecule as described herein, which comprises an additional exogenous material; whereby upon administration of the multivalent CD20-binding molecule to one or more cells physically coupled with CD20, which have the extracellular part bound by the two or more CD20 binding regions of the multivalent CD20-binding molecule, the multivalent CD20-binding molecule internalizes into the one or more cells in about five hours, four hours, three hours, two hours, one hour, thirty minutes, or less at a physiological temperature appropriate for the cell and/or at about 37 degrees Celsius. In some embodiments, the one or more cell(s) expresses at a cellular surface the CD20 which (1) have the extracellular part bound by the two or more CD20 binding regions of the multivalent CD20-binding molecule, (2) have a transmembrane domain, and (3) remain physically coupled to the cell. In some embodiments, one or more cell(s) is a CD20 positive cell. For certain embodiments, one or more cell(s) is physically coupled with a significant amount of extracellular CD20 which (1) have the extracellular part bound by the two or more CD20 binding regions of the multivalent CD20-binding molecule. For certain embodiments, one or more cell(s) is a descendant or member of a B-cell lineage. For certain embodiments, one or more cell(s) is a malignant B-cell, B-cell leukemia cell, B-cell lymphoma cell, B-cell myeloma cell, acute myeloid leukemia cell, acute non-lymphocytic leukemia cell, B-cell chronic lymphocytic leukemia cell, B-cell lymphoma cell, B-cell non-Hodgkin's lymphoma cell, B-cell precursor acute lymphoblastic leukemia cell, B-cell prolymphocytic leukemia cell, Burkitt's lymphoma cell, chronic lymphocytic leukemia cell, chronic myeloid leukemia cell, diffuse large B-cell lymphoma cell, follicular lymphoma cell, hairy cell leukemia cell, Hodgkin's lymphoma cell, immunoblastic large cell lymphoma cell, mantle cell lymphoma cell, melanoma cell, multiple myeloma cell, neoplastic plasma cell, nodular lymphocyte predominant Hodgkin's lymphoma cell, non-Hodgkin's lymphoma cell, plasmablastic lymphoma cell, plasma cell myeloma cell, precursor B-lymphoblastic lymphoma cell, small lymphocytic lymphoma cell, malignant T-cell, T-cell leukemia cell, T-cell lymphoma cell, T-cell large granular lymphocyte leukemia cell, T-cell prolymphocytic leukemia, healthy B-cell lineage cell, or healthy T-cell.

[0509] For certain embodiments of the multivalent CD20-binding molecule as described herein, which comprises an additional exogenous material; whereby upon administration of the multivalent CD20-binding molecule to one or more cells physically coupled with CD20, which have the extracellular part bound by the two or more CD20 binding regions of the multivalent CD20-binding molecule, the multivalent CD20-binding molecule internalizes into the one or more cells and delivers the additional exogenous material into the interior of the cell in about five hours, four hours, three hours, two hours, one hour, thirty minutes, or less at a physiological temperature appropriate for the cell and/or at about 37 degrees Celsius. In some embodiments, the one or more cell(s) expresses at a cellular surface the CD20 which (1) have the extracellular part bound by the two or more CD20 binding regions of the multivalent CD20-binding molecule, (2) have a transmembrane domain, and (3) remain physically coupled to the cell. In some embodiments, one or more cell(s) is a CD20 positive cell. For certain embodiments, one or more cell(s) is physically coupled with a significant amount of extracellular CD20 which (1) have the extracellular part bound by the two or more CD20 binding regions of the multivalent CD20-binding molecule. For certain embodiments, one or more cell(s) is a descendant or member of a B-cell lineage. For certain embodiments, one or more cell(s) is a malignant B-cell, B-cell leukemia cell, B-cell lymphoma cell, B-cell myeloma cell, acute myeloid leukemia cell, acute non-lymphocytic leukemia cell, B-cell chronic lymphocytic leukemia cell, B-cell lymphoma cell, B-cell non-Hodgkin's lymphoma cell, B-cell precursor acute lymphoblastic leukemia cell, B-cell prolymphocytic leukemia cell, Burkitt's lymphoma cell, chronic lymphocytic leukemia cell, chronic myeloid leukemia cell, diffuse large B-cell lymphoma cell, follicular lymphoma cell, hairy cell leukemia cell, Hodgkin's lymphoma cell, immunoblastic large cell lymphoma cell, mantle cell lymphoma cell, melanoma cell, multiple myeloma cell, neoplastic plasma cell, nodular lymphocyte predominant Hodgkin's lymphoma cell, non-Hodgkin's lymphoma cell, plasmablastic lymphoma cell, plasma cell myeloma cell, precursor B-lymphoblastic lymphoma cell, small lymphocytic lymphoma cell, malignant T-cell, T-cell leukemia cell, T-cell lymphoma cell, T-cell large granular lymphocyte leukemia cell, T-cell prolymphocytic leukemia, healthy B-cell lineage cell, or healthy T-cell.

[0510] For certain embodiments of the multivalent CD20-binding molecule as described herein, which comprises an additional exogenous material; whereby upon administration of the multivalent CD20-binding molecule to a plurality of cells physically coupled with CD20, which have the extracellular part bound by the two or more CD20 binding regions of the multivalent CD20-binding molecule, at a concentration of multivalent CD20-binding molecule equivalent to five or thirty-eight percent to fifty percent cell-surface occupancy, the majority of the multivalent CD20-binding molecule internalizes into the plurality of cells in about five hours, four hours, three hours, two hours, one hour, thirty minutes, or less at a physiological temperature appropriate for the cell and/or at about 37 degrees Celsius. In some embodiments, members of the plurality of cells express at a cellular surface the CD20 which (1) have the extracellular part bound by the two or more CD20 binding regions of the multivalent CD20-binding molecule, (2) have a transmembrane domain, and (3) remain physically coupled to the cell. In some embodiments, members of the plurality of cells are CD20 positive cells. For certain embodiments, the members of the plurality of cells are physically coupled with a significant amount of extracellular CD20 which (1) have the extracellular part bound by the two or more CD20 binding regions of the multivalent CD20-binding molecule. For certain embodiments, members of the plurality of cells are descendants or members of a B-cell lineage. For certain embodiments, members of the plurality of cells are malignant B-cell, B-cell leukemia cell, B-cell lymphoma cell, B-cell myeloma cell, acute myeloid leukemia cell, acute non-lymphocytic leukemia cell, B-cell chronic lymphocytic leukemia cell, B-cell lymphoma cell, B-cell non-Hodgkin's lymphoma cell, B-cell precursor acute lymphoblastic leukemia cell, B-cell prolymphocytic leukemia cell, Burkitt's lymphoma cell, chronic lymphocytic leukemia cell, chronic myeloid leukemia cell, diffuse large B-cell lymphoma cell, follicular lymphoma cell, hairy cell leukemia cell, Hodgkin's lymphoma cell, immunoblastic large cell lymphoma cell, mantle cell lymphoma cell, melanoma cell, multiple myeloma cell, neoplastic plasma cell, nodular lymphocyte predominant Hodgkin's lymphoma cell, non-Hodgkin's lymphoma cell, plasmablastic lymphoma cell, plasma cell myeloma cell, precursor B-lymphoblastic lymphoma cell, small lymphocytic lymphoma cell, malignant T-cell, T-cell leukemia cell, T-cell lymphoma cell, T-cell large granular lymphocyte leukemia cell, T-cell prolymphocytic leukemia, healthy B-cell lineage cell, or healthy T-cell members.

[0511] For certain embodiments of the multivalent CD20-binding molecule as described herein, which comprises an additional exogenous material; whereby upon administration of the multivalent CD20-binding molecule to one or more cells physically coupled with CD20, which have the extracellular part bound by the two or more CD20 binding regions of the multivalent CD20-binding molecule, the multivalent CD20-binding molecule internalizes into the one or more cells and delivers the additional exogenous material into the interior of the cell in about five hours, four hours, three hours, two hours, one hour, thirty minutes, or less at a physiological temperature appropriate for the cell and/or at about 37 degrees Celsius. In some embodiments, the one or more cell(s) expresses at a cellular surface the CD20 which (1) have the extracellular part bound by the two or more CD20 binding regions of the multivalent CD20-binding molecule, (2) have a transmembrane domain, and (3) remain physically coupled to the cell. In some embodiments, one or more cell(s) is a CD20 positive cell. For certain embodiments, one or more cell(s) is physically coupled with a significant amount of extracellular CD20 which (1) have the extracellular part bound by the two or more CD20 binding regions of the multivalent CD20-binding molecule. For certain embodiments, one or more cell(s) is a descendant or member of a B-cell lineage. For certain embodiments, one or more cell(s) is a malignant B-cell, B-cell leukemia cell, B-cell lymphoma cell, B-cell myeloma cell, acute myeloid leukemia cell, acute non-lymphocytic leukemia cell, B-cell chronic lymphocytic leukemia cell, B-cell lymphoma cell, B-cell non-Hodgkin's lymphoma cell, B-cell precursor acute lymphoblastic leukemia cell, B-cell prolymphocytic leukemia cell, Burkitt's lymphoma cell, chronic lymphocytic leukemia cell, chronic myeloid leukemia cell, diffuse large B-cell lymphoma cell, follicular lymphoma cell, hairy cell leukemia cell, Hodgkin's lymphoma cell, immunoblastic large cell lymphoma cell, mantle cell lymphoma cell, melanoma cell, multiple myeloma cell, neoplastic plasma cell, nodular lymphocyte predominant Hodgkin's lymphoma cell, non-Hodgkin's lymphoma cell, plasmablastic lymphoma cell, plasma cell myeloma cell, precursor B-lymphoblastic lymphoma cell, small lymphocytic lymphoma cell, malignant T-cell, T-cell leukemia cell, T-cell lymphoma cell, T-cell large granular lymphocyte leukemia cell, T-cell prolymphocytic leukemia, healthy B-cell lineage cell, or healthy T-cell.

[0512] For certain embodiments of the multivalent CD20-binding molecule as described herein, which comprises an additional exogenous material; whereby upon administration of the multivalent CD20-binding molecule to a plurality of cells physically coupled with CD20, which have the extracellular part bound by the two or more CD20 binding regions of the multivalent CD20-binding molecule, at a concentration of multivalent CD20-binding molecule equivalent to five or thirty-eight percent to fifty percent cell-surface occupancy, the majority of the multivalent CD20-binding molecule internalizes into the plurality of cells and delivers the additional exogenous material into the interiors of the cells in about five hours, four hours, three hours, two hours, one hour, thirty minutes, or less at a physiological temperature appropriate for the cell and/or at about 37 degrees Celsius. In some embodiments, members of the plurality of cells express at a cellular surface the CD20 which (1) have the extracellular part bound by the two or more CD20 binding regions of the multivalent CD20-binding molecule, (2) have a transmembrane domain, and (3) remain physically coupled to the cell. In some embodiments, members of the plurality of cells are CD20 positive cells. For certain embodiments, the members of the plurality of cells are physically coupled with a significant amount of extracellular CD20 which (1) have the extracellular part bound by the two or more CD20 binding regions of the multivalent CD20-binding molecule. For certain embodiments, members of the plurality of cells are descendants or members of a B-cell lineage. For certain embodiments, members of the plurality of cells are malignant B-cell, B-cell leukemia cell, B-cell lymphoma cell, B-cell myeloma cell, acute myeloid leukemia cell, acute non-lymphocytic leukemia cell, B-cell chronic lymphocytic leukemia cell, B-cell lymphoma cell, B-cell non-Hodgkin's lymphoma cell, B-cell precursor acute lymphoblastic leukemia cell, B-cell prolymphocytic leukemia cell, Burkitt's lymphoma cell, chronic lymphocytic leukemia cell, chronic myeloid leukemia cell, diffuse large B-cell lymphoma cell, follicular lymphoma cell, hairy cell leukemia cell, Hodgkin's lymphoma cell, immunoblastic large cell lymphoma cell, mantle cell lymphoma cell, melanoma cell, multiple myeloma cell, neoplastic plasma cell, nodular lymphocyte predominant Hodgkin's lymphoma cell, non-Hodgkin's lymphoma cell, plasmablastic lymphoma cell, plasma cell myeloma cell, precursor B-lymphoblastic lymphoma cell, small lymphocytic lymphoma cell, malignant T-cell, T-cell leukemia cell, T-cell lymphoma cell, T-cell large granular lymphocyte leukemia cell, T-cell prolymphocytic leukemia, healthy B-cell lineage cell, or healthy T-cell members.

[0513] The embodiments of the CD20-binding molecules as described herein for the delivery of additional exogenous material into a cell each comprise (1) one or more CD20 binding regions capable of specifically binding an extracellular part of a CD20, (2) a Shiga toxin effector polypeptide, and (3) an additional exogenous material. In some embodiments, the CD20-binding molecule as described herein comprises an additional exogenous material such as a cytotoxic agent, detection promoting agent, peptide, polypeptide, protein, or polynucleotide. In some embodiments, the additional exogenous material is the protein comprising an enzyme. In certain other embodiments, the additional exogenous material is the polynucleotide which functions as a small inhibiting RNA (siRNA) or microRNA (miRNA). In some embodiments, the additional exogenous material is the peptide which is an antigen, such as, e.g., from a pathogen. In some embodiments, the antigen comprises, consisting essentially of, or consisting of SEQ ID NO:46. In some embodiments, the antigen is derived from a bacterial protein, protein mutated in cancer, protein aberrantly expressed in cancer, T-cell complementary determining region polypeptide, and/or viral protein. In some embodiments, the cytotoxic agent is a chemotherapeutic agent, cytotoxic antibiotic, alkylating agent, antimetabolite, topoisomerase inhibitor, or tubulin inhibitor.

[0514] Also provided herein are compositions comprising a multivalent CD20-binding molecule (CD20-binding molecule compositions) as described herein, such as, e.g., compositions enriched for a multivalent CD20-binding molecule as described herein and/or compositions with relatively large proportions of multivalent CD20-binding molecule relative to monovalent CD20-binding molecules. In some embodiments, the multivalent CD20-binding molecule composition as described herein comprises a multivalent CD20-binding molecule as described herein, wherein the composition comprises a ratio of monovalent CD20-binding molecule concentration to total CD20-binding molecule concentration of less than one to three; and wherein each monovalent CD20-binding molecule comprises only one CD20 binding region capable of specifically binding an extracellular part of a CD20 and comprises at least one Shiga toxin effector polypeptide. In some embodiments, the multivalent CD20-binding molecule composition comprises the ratio of monovalent CD20-binding molecule concentration to total CD20-binding protein concentration of less than the ratio selected from the following: 1:5, 1:6, 1:7, 1:8, 1:9, 1:10, and 1:11. In some embodiments, the multivalent CD20-binding molecule composition as described herein comprises a ratio of multivalent CD20-binding molecule concentration to total CD20-binding molecule concentration of more than two to three.

[0515] In some embodiments, the multivalent CD20-binding molecule composition as described herein comprises a ratio of relatively large valence, CD20-binding molecule concentration to total CD20-binding molecule concentration of less than the ratio selected from the following: 1:4, 1:7, 1:11, 1:21, 1:41, 1:71, 1:111, and 1:161; wherein each relatively large valence, CD20-binding molecule comprises three or more CD20 binding regions capable of specifically binding an extracellular part of a CD20 and comprises at least one Shiga toxin effector polypeptide.

[0516] In some embodiments, the multivalent CD20-binding molecule composition as described herein comprises a ratio of bivalent CD20-binding molecule concentration to total CD20-binding molecule concentration of more than a ratio selected from the following: 1:2, 2:3, 3:4, 4:5, 5:6, 7:8, 8:9, 9:10, 10:11, 11:12, 12:13, 13:14, and 14:15; wherein each bivalent CD20-binding molecule comprises (1) only two CD20 binding regions capable of specifically binding an extracellular part of a CD20 and (2) one or more Shiga toxin effector polypeptides.

[0517] For certain embodiments of the multivalent CD20-binding molecule composition as described herein, upon administration of the multivalent CD20-binding molecule composition to a first population of cells physically coupled to CD20, and a second population of cells, a cytotoxic effect of the multivalent CD20-binding molecule composition to members of said first population of cells relative to members of said second population of cells is at least 3-fold greater. In some embodiments, members of the first population of cells express at a cellular surface the CD20 which (1) have the extracellular part bound by the two or more CD20 binding regions of a multivalent CD20-binding molecule of the multivalent CD20-binding molecule composition, (2) have a transmembrane domain, and (3) remain physically coupled to the cell. In some embodiments, members of the first population of cells are CD20 positive cells. For certain embodiments, the members of the first population of cells are physically coupled with a significant amount of extracellular CD20 which (1) have the extracellular part bound by the two or more CD20 binding regions of a multivalent CD20-binding molecule of the multivalent CD20-binding molecule composition. For certain embodiments, members of the first population of cells over-express, at a cellular surface, CD20 which have the extracellular part bound by the two or more CD20 binding regions of a multivalent CD20-binding molecule of the multivalent CD20-binding molecule composition. For certain embodiments, members of the first population of cells over-express CD20 which (1) have the extracellular part bound by the two or more CD20 binding regions of a multivalent CD20-binding molecule of the multivalent CD20-binding molecule composition, (2) have a transmembrane domain, and (3) remain physically coupled to the cell. For certain embodiments, members of the first population of cells are descendants or members of a B-cell lineage. For certain embodiments, members of the first population of cells are malignant B-cell, B-cell leukemia cell, B-cell lymphoma cell, B-cell myeloma cell, acute myeloid leukemia cell, acute non-lymphocytic leukemia cell, B-cell chronic lymphocytic leukemia cell, B-cell lymphoma cell, B-cell non-Hodgkin's lymphoma cell, B-cell precursor acute lymphoblastic leukemia cell, B-cell prolymphocytic leukemia cell, Burkitt's lymphoma cell, chronic lymphocytic leukemia cell, chronic myeloid leukemia cell, diffuse large B-cell lymphoma cell, follicular lymphoma cell, hairy cell leukemia cell, Hodgkin's lymphoma cell, immunoblastic large cell lymphoma cell, mantle cell lymphoma cell, melanoma cell, multiple myeloma cell, neoplastic plasma cell, nodular lymphocyte predominant Hodgkin's lymphoma cell, non-Hodgkin's lymphoma cell, plasmablastic lymphoma cell, plasma cell myeloma cell, precursor B-lymphoblastic lymphoma cell, small lymphocytic lymphoma cell, malignant T-cell, T-cell leukemia cell, T-cell lymphoma cell, T-cell large granular lymphocyte leukemia cell, T-cell prolymphocytic leukemia, healthy B-cell lineage cell, or healthy T-cell members. For certain embodiments, the members of the second population of cells are not physically coupled with extracellular CD20 and/or are CD20 negative. For certain embodiments, the members of the second population of cells are not physically coupled with extracellular CD20 which (1) have the extracellular part bound by the two or more CD20 binding regions of the multivalent CD20-binding molecule. In some embodiments, members of the second population of cells express at a cellular surface the CD20 which (1) have the extracellular part bound by the two or more CD20 binding regions of a multivalent CD20-binding molecule of the multivalent CD20-binding molecule composition, (2) have a transmembrane domain, and (3) remain physically coupled to the cell. For certain embodiments, the members of the second population of cells are not physically coupled with a significant amount of extracellular CD20 which (1) have the extracellular part bound by the two or more CD20 binding regions of any multivalent CD20-binding molecule of the multivalent CD20-binding molecule composition. For certain embodiments of the multivalent CD20-binding molecule composition as described herein, upon administration of the multivalent CD20-binding molecule composition to a first population of cells whose members are CD20 positive, and a second population of cells whose members are not CD20 positive, a cytotoxic effect of the multivalent CD20-binding molecule composition to members of said first population of cells relative to members of said second population of cells is at least 3-fold greater.

[0518] In some embodiments, the multivalent CD20-binding molecule composition as described herein comprises a multivalent CD20-binding molecule having one or more monovalent CD20-binding molecule components; and whereby upon administration of the multivalent CD20-binding molecule composition as described herein to a population of cells physically coupled with CD20, which have the extracellular part bound by two or more CD20 binding regions of the multivalent CD20-binding molecule, the multivalent CD20-binding molecule composition exhibits a cytotoxic effect which is greater than a cytotoxic effect resulting from administration of an equivalent amount, mass, or molarity of any one of the monovalent CD20-binding molecule components to a population of the same CD20 positive cells under same conditions by a factor of 1.33, 1.5, 1.75, 2, 3, 5, 7.5, 10, 20, 100, or greater than the change in CD20-binding valence between the monovalent CD20-binding component and the multivalent CD20-binding molecule. In some embodiments, members of the population of cells express at a cellular surface the CD20 which (1) have the extracellular part bound by the two or more CD20 binding regions of the multivalent CD20-binding molecule, (2) have a transmembrane domain, and (3) remain physically coupled to the cell. In some embodiments, members of the population of cells are CD20 positive cells. For certain embodiments, the members of the population of cells are physically coupled with a significant amount of extracellular CD20 which (1) have the extracellular part bound by the two or more CD20 binding regions of the multivalent CD20-binding molecule. For certain embodiments, members of the population of cells are descendants or members of a B-cell lineage. For certain embodiments, members of the population of cells are malignant B-cell, B-cell leukemia cell, B-cell lymphoma cell, B-cell myeloma cell, acute myeloid leukemia cell, acute non-lymphocytic leukemia cell, B-cell chronic lymphocytic leukemia cell, B-cell lymphoma cell, B-cell non-Hodgkin's lymphoma cell, B-cell precursor acute lymphoblastic leukemia cell, B-cell prolymphocytic leukemia cell, Burkitt's lymphoma cell, chronic lymphocytic leukemia cell, chronic myeloid leukemia cell, diffuse large B-cell lymphoma cell, follicular lymphoma cell, hairy cell leukemia cell, Hodgkin's lymphoma cell, immunoblastic large cell lymphoma cell, mantle cell lymphoma cell, melanoma cell, multiple myeloma cell, neoplastic plasma cell, nodular lymphocyte predominant Hodgkin's lymphoma cell, non-Hodgkin's lymphoma cell, plasmablastic lymphoma cell, plasma cell myeloma cell, precursor B-lymphoblastic lymphoma cell, small lymphocytic lymphoma cell, malignant T-cell, T-cell leukemia cell, T-cell lymphoma cell, T-cell large granular lymphocyte leukemia cell, T-cell prolymphocytic leukemia, healthy B-cell lineage cell, or healthy T-cell members. In some embodiments, the multivalent CD20-binding molecule composition as described herein comprises a multivalent CD20-binding molecule having one or more monovalent CD20-binding molecule components; and whereby upon administration of the multivalent CD20-binding molecule composition as described herein to a population of CD20 positive cells expressing CD20 which have the extracellular part bound by two or more CD20 binding regions of the multivalent CD20-binding molecule, the multivalent CD20-binding molecule composition exhibits a cytotoxic effect which is greater than a cytotoxic effect resulting from administration of an equivalent amount, mass, or molarity of any one of the monovalent CD20-binding molecule components to a population of the same CD20 positive cells under same conditions by a factor of 1.33, 1.5, 1.75, 2, 3, 5, 7.5, 10, 20, 100, or greater than the change in CD20-binding valence between the monovalent CD20-binding component and the multivalent CD20-binding molecule.

[0519] For certain embodiments of the multivalent CD20-binding molecule composition as described herein, which comprises a multivalent CD20-binding molecule having an additional exogenous material; whereby upon administration of the multivalent CD20-binding molecule composition to a plurality of cells physically coupled with CD20, which have the extracellular part bound by the two or more CD20 binding regions of the multivalent CD20-binding molecule, at a concentration of multivalent CD20-binding molecule equivalent to five or thirty-eight percent to fifty percent cell-surface occupancy, the majority of the multivalent CD20-binding molecule internalizes into the plurality of cells in about five hours, four hours, three hours, two hours, one hour, thirty minutes, or less at a physiological temperature appropriate for the cell and/or at about 37 degrees Celsius. In some embodiments, members of the plurality of cells express at a cellular surface the CD20 which (1) have the extracellular part bound by the two or more CD20 binding regions of the multivalent CD20-binding molecule, (2) have a transmembrane domain, and (3) remain physically coupled to the cell. In some embodiments, members of the plurality of cells are CD20 positive cells. For certain embodiments, the members of the plurality of cells are physically coupled with a significant amount of extracellular CD20 which (1) have the extracellular part bound by the two or more CD20 binding regions of the multivalent CD20-binding molecule. For certain embodiments, members of the plurality of cells are descendants or members of a B-cell lineage. For certain embodiments, members of the plurality of cells are malignant B-cell, B-cell leukemia cell, B-cell lymphoma cell, B-cell myeloma cell, acute myeloid leukemia cell, acute non-lymphocytic leukemia cell, B-cell chronic lymphocytic leukemia cell, B-cell lymphoma cell, B-cell non-Hodgkin's lymphoma cell, B-cell precursor acute lymphoblastic leukemia cell, B-cell prolymphocytic leukemia cell, Burkitt's lymphoma cell, chronic lymphocytic leukemia cell, chronic myeloid leukemia cell, diffuse large B-cell lymphoma cell, follicular lymphoma cell, hairy cell leukemia cell, Hodgkin's lymphoma cell, immunoblastic large cell lymphoma cell, mantle cell lymphoma cell, melanoma cell, multiple myeloma cell, neoplastic plasma cell, nodular lymphocyte predominant Hodgkin's lymphoma cell, non-Hodgkin's lymphoma cell, plasmablastic lymphoma cell, plasma cell myeloma cell, precursor B-lymphoblastic lymphoma cell, small lymphocytic lymphoma cell, malignant T-cell, T-cell leukemia cell, T-cell lymphoma cell, T-cell large granular lymphocyte leukemia cell, T-cell prolymphocytic leukemia, healthy B-cell lineage cell, or healthy T-cell members.

[0520] For certain embodiments of the multivalent CD20-binding molecule composition as described herein, which comprises a multivalent CD20-binding molecule having an additional exogenous material; whereby upon administration of the multivalent CD20-binding molecule composition to one or more cells physically coupled with CD20, which have the extracellular part bound by the two or more CD20 binding regions of the multivalent CD20-binding molecule, the multivalent CD20-binding molecule internalizes into the one or more cells and delivers the additional exogenous material into the interior of the cell in about five hours, four hours, three hours, two hours, one hour, thirty minutes, or less at a physiological temperature appropriate for the cell and/or at about 37 degrees Celsius. In some embodiments, the one or more cell(s) expresses at a cellular surface the CD20 which (1) have the extracellular part bound by the two or more CD20 binding regions of the multivalent CD20-binding molecule, (2) have a transmembrane domain, and (3) remain physically coupled to the cell. In some embodiments, one or more cell(s) is a CD20 positive cell. For certain embodiments, one or more cell(s) is physically coupled with a significant amount of extracellular CD20 which (1) have the extracellular part bound by the two or more CD20 binding regions of the multivalent CD20-binding molecule. For certain embodiments, one or more cell(s) is a descendant or member of a B-cell lineage. For certain embodiments, one or more cell(s) is a malignant B-cell, B-cell leukemia cell, B-cell lymphoma cell, B-cell myeloma cell, acute myeloid leukemia cell, acute non-lymphocytic leukemia cell, B-cell chronic lymphocytic leukemia cell, B-cell lymphoma cell, B-cell non-Hodgkin's lymphoma cell, B-cell precursor acute lymphoblastic leukemia cell, B-cell prolymphocytic leukemia cell, Burkitt's lymphoma cell, chronic lymphocytic leukemia cell, chronic myeloid leukemia cell, diffuse large B-cell lymphoma cell, follicular lymphoma cell, hairy cell leukemia cell, Hodgkin's lymphoma cell, immunoblastic large cell lymphoma cell, mantle cell lymphoma cell, melanoma cell, multiple myeloma cell, neoplastic plasma cell, nodular lymphocyte predominant Hodgkin's lymphoma cell, non-Hodgkin's lymphoma cell, plasmablastic lymphoma cell, plasma cell myeloma cell, precursor B-lymphoblastic lymphoma cell, small lymphocytic lymphoma cell, malignant T-cell, T-cell leukemia cell, T-cell lymphoma cell, T-cell large granular lymphocyte leukemia cell, T-cell prolymphocytic leukemia, healthy B-cell lineage cell, or healthy T-cell.

[0521] For certain embodiments of the multivalent CD20-binding molecule composition as described herein, which comprises a multivalent CD20-binding molecule having an additional exogenous material; whereby upon administration of the multivalent CD20-binding molecule composition to a plurality of cells physically coupled with CD20, which have the extracellular part bound by the two or more CD20 binding regions of the multivalent CD20-binding molecule, at a concentration of multivalent CD20-binding molecule equivalent to five or thirty-eight percent to fifty percent cell-surface occupancy, the majority of the multivalent CD20-binding molecule internalizes into the plurality of cells and delivers the additional exogenous material into the interiors of the cells in about five hours, four hours, three hours, two hours, one hour, thirty minutes, or less at a physiological temperature appropriate for the cell and/or at about 37 degrees Celsius. In some embodiments, members of the plurality of cells express at a cellular surface the CD20 which (1) have the extracellular part bound by the two or more CD20 binding regions of the multivalent CD20-binding molecule, (2) have a transmembrane domain, and (3) remain physically coupled to the cell. In some embodiments, members of the plurality of cells are CD20 positive cells. For certain embodiments, the members of the plurality of cells are physically coupled with a significant amount of extracellular CD20 which (1) have the extracellular part bound by the two or more CD20 binding regions of the multivalent CD20-binding molecule. For certain embodiments, members of the plurality of cells are descendants or members of a B-cell lineage. For certain embodiments, members of the plurality of cells are malignant B-cell, B-cell leukemia cell, B-cell lymphoma cell, B-cell myeloma cell, acute myeloid leukemia cell, acute non-lymphocytic leukemia cell, B-cell chronic lymphocytic leukemia cell, B-cell lymphoma cell, B-cell non-Hodgkin's lymphoma cell, B-cell precursor acute lymphoblastic leukemia cell, B-cell prolymphocytic leukemia cell, Burkitt's lymphoma cell, chronic lymphocytic leukemia cell, chronic myeloid leukemia cell, diffuse large B-cell lymphoma cell, follicular lymphoma cell, hairy cell leukemia cell, Hodgkin's lymphoma cell, immunoblastic large cell lymphoma cell, mantle cell lymphoma cell, melanoma cell, multiple myeloma cell, neoplastic plasma cell, nodular lymphocyte predominant Hodgkin's lymphoma cell, non-Hodgkin's lymphoma cell, plasmablastic lymphoma cell, plasma cell myeloma cell, precursor B-lymphoblastic lymphoma cell, small lymphocytic lymphoma cell, malignant T-cell, T-cell leukemia cell, T-cell lymphoma cell, T-cell large granular lymphocyte leukemia cell, T-cell prolymphocytic leukemia, healthy B-cell lineage cell, or healthy T-cell members.

[0522] Also provided herein are solvates, hydrates, salts, and/or powders comprising a multivalent CD20-binding molecule and/or multivalent CD20-binding molecule composition as described herein. For certain embodiments, the solvate as described herein comprises one or more multivalent CD20-binding molecules as described herein and/or a multivalent CD20-binding molecule composition as described herein. For certain embodiments, the salt as described herein comprises one or more multivalent CD20-binding molecules as described herein and/or a multivalent CD20-binding molecule composition as described herein.

[0523] Also provided herein are pharmaceutical compositions comprising a multivalent CD20-binding molecule as described herein and/or a multivalent CD20-binding molecule composition as described herein, and comprising at least one pharmaceutically acceptable excipient or carrier; and the use of such a multivalent CD20-binding molecule or a composition comprising it in making such pharmaceutical compositions and in methods as described herein as further described herein. Certain embodiments as described herein are pharmaceutical compositions comprising any multivalent CD20 binding molecule as described herein (e.g. a multivalent CD20-binding protein as described herein) and at least one pharmaceutically acceptable excipient or carrier.

[0524] Also provided herein are pharmaceutical compositions comprising a multivalent CD20-binding molecule as described herein, a multivalent CD20-binding molecule composition as described herein, a solvate as described herein, and/or a salt as described herein; and comprising at least one pharmaceutically acceptable excipient, carrier, buffer, isotonic agent, surfactant, antioxidant, and/or metal-chelating agent.

[0525] Certain embodiments as described herein are pharmaceutical compositions comprising any multivalent CD20 binding molecule as described herein (e.g. a multivalent CD20-binding protein as described herein) and at least one pharmaceutically acceptable carrier, solvent, vehicle, sterile aqueous solution, buffer, powder, sterile powder, surfactant, antioxidant, chelating agent, antimicrobial agent, preservative, isotonic agent, dispersion medium, coating, adjuvant, wetting agent, emulsifying agent, dispersing agent, adsorption delaying agent, stabilizer, and/or additive.

[0526] In some embodiments CD20-binding molecule composition, the solvate, the salt, or the pharmaceutical composition as described herein comprises: acetate, alcohol, alpha-tocopherol, aluminum monostearate, ascorbic acid, ascorbyl palmitate, benzyl alcohol, butylated hydroxyanisole, butylated hydroxytoluene, chlorobutanol, citrate, cysteine hydrochloride, dextrose, ethanol, ethylenediaminetetraacetic acid, ethyloleate, gelatin, glycerine, glycerol, lactic acid, lecithin, mannitol, methyl parabens, monostearate salt, organic ester, paraben, phenol phosphate, phosphoric acid, polyalcohol, polyethylene glycol, polyol, propylene glycol, propylgallate, Ringer's solution, saline, sodium bisulfate, sodium bisulfite, sodium chloride, sodium metabisulfite, sodium sulfite, sorbic acid, sorbitol, sugar, tartaric acid, vegetable oil, and/or water.

[0527] Certain embodiments as described herein are pharmaceutical compositions comprising any multivalent CD20 binding molecule as described herein (e.g. a multivalent CD20-binding protein as described herein) and at least one pharmaceutically acceptable excipient or carrier. In some embodiments, the excipient is acetate, alcohol, alpha-tocopherol, aluminum monostearate, ascorbic acid, ascorbyl palmitate, benzyl alcohol, butylated hydroxyanisole, butylated hydroxytoluene, chlorobutanol, citrate, cysteine hydrochloride, dextrose, ethanol, ethylenediaminetetraacetic acid, ethyloleate, gelatin, glycerine, glycerol, lactic acid, lecithin, mannitol, methyl parabens, monostearate salt, organic ester, paraben, phenol phosphate, phosphoric acid, polyalcohol, polyethylene glycol, polyol, propylene glycol, propylgallate, sodium bisulfate, sodium bisulfite, sodium chloride, sodium metabisulfite, sodium sulfite, sorbic acid, sorbitol, sugar, tartaric acid, and/or vegetable oil.

[0528] Among certain embodiments as described herein is a diagnostic composition comprising a multivalent CD20-binding molecule as described herein that further comprises a detection promoting agent for the collection of information about a cell, cell type, tissue, organ, disease, disorder, condition, subject, and/or patient.

[0529] In some embodiments, the solvate, salt, pharmaceutical composition, and/or diagnostic composition as described herein comprises a ratio of monovalent CD20-binding molecule concentration to total CD20-binding molecule concentration of less than one to three; and wherein each monovalent CD20-binding molecule comprises only one CD20 binding region capable of specifically binding an extracellular part of a CD20 and comprises at least one Shiga toxin effector polypeptide. In some embodiments, the solvate, salt, pharmaceutical composition, and/or diagnostic composition comprises the ratio of monovalent CD20-binding molecule concentration to total CD20-binding protein concentration of less than the ratio selected from the following: 1:5, 1:6, 1:7, 1:8, 1:9, 1:10, and 1:11. In some embodiments, the solvate, salt, pharmaceutical composition, and/or diagnostic composition as described herein comprises a ratio of multivalent CD20-binding molecule concentration to total CD20-binding molecule concentration of more than two to three.

[0530] In some embodiments, the solvate, salt, pharmaceutical composition, and/or diagnostic composition as described herein comprises a ratio of relatively large valence, CD20-binding molecule concentration to total CD20-binding molecule concentration of less than the ratio selected from the following: 1:4, 1:7, 1:11, 1:21, 1:41, 1:71, 1:111, and 1:161; wherein each relatively large valence, CD20-binding molecule comprises three or more CD20 binding regions capable of specifically binding an extracellular part of a CD20 and comprises at least one Shiga toxin effector polypeptide.

[0531] In some embodiments, the solvate, salt, pharmaceutical composition, and/or diagnostic composition comprises a ratio of bivalent CD20-binding molecule concentration to total CD20-binding molecule concentration of more than a ratio selected from the following: 1:2, 2:3, 3:4, 4:5, 5:6, 7:8, 8:9, 9:10, 10:11, 11:12, 12:13, 13:14, and 14:15; wherein each bivalent CD20-binding molecule comprises (1) only two CD20 binding regions capable of specifically binding an extracellular part of a CD20 and (2) one or more Shiga toxin effector polypeptides.

[0532] Beyond the multivalent CD20-binding molecules as described herein, and compositions thereof, polynucleotides capable of encoding a multivalent CD20-binding molecule as described herein (e.g. a multivalent CD20-binding protein), or polypeptide component thereof, are within the scope as described herein, as well as expression vectors which comprise a polynucleotide described herein and host cells comprising an expression vector as described herein. Host cells comprising an expression vector as described herein may be used, e.g., in methods for producing a multivalent CD20-binding molecule as described herein or a polypeptide component or fragment thereof by recombinant expression. Similarly, host cells comprising an expression vector as described herein may be used, e.g., in methods for producing a multivalent CD20-binding molecule composition as described herein, or a polypeptide component thereof.

[0533] Also encompassed herein is any composition of matter as described herein which is immobilized on a solid substrate. Such arrangements of the compositions of matter as described herein may be utilized, e.g., in methods of screening molecules as described herein.

[0534] Also provided herein are methods of killing cell(s) comprising the step of contacting a cell(s) with a multivalent CD20-binding molecule as described herein, a multivalent CD20-binding molecule composition as described herein, a solvate as described herein, a salt as described herein, and/or a pharmaceutical composition as described herein. For certain embodiments, the step of contacting the cell(s) occurs in vitro. For certain other embodiments, the step of contacting the cell(s) occurs in vivo. For certain embodiments of the cell-killing methods as described herein, the method is capable of selectively killing cell(s) and/or cell types preferentially over other cell(s) and/or cell types when contacting a mixture of cells comprising different cells which differ with respect to the cell-surface presence and/or expression level of a CD20 bound by the two or more CD20 binding regions of the multivalent CD20-binding molecule and/or the multivalent CD20-binding molecule of the composition as described herein (e.g., a multivalent CD20-binding molecule composition and/or a pharmaceutical composition as described herein).

[0535] Also provided herein is a method of inducing cellular internalization of a multivalent CD20-binding molecule into a cell(s) physically coupled with CD20, which have the extracellular part bound by two or more CD20 binding regions of the multivalent CD20-binding molecule, the method comprising the step of contacting the cell(s) with a multivalent CD20-binding molecule as described herein, a multivalent CD20-binding molecule composition as described herein, a solvate as described herein, a salt as described herein, a pharmaceutical composition as described herein, and/or a diagnostic composition as described herein. In some embodiments of the inducing cellular internalization method, the step of contacting the cell(s) occurs in vitro. For certain other embodiments, the step of contacting the cell(s) occurs in vivo, such as, e.g., within a patient. In some embodiments of the inducing cellular internalization method, the cellular internalization of the multivalent CD20-binding molecule occurs in about five hours, four hours, three hours, two hours, one hour, thirty minutes, or less at a physiological temperature appropriate for the cell and/or at about 37 degrees Celsius. In some embodiments, the cell expresses at a cellular surface the CD20 which (1) have the extracellular part bound by the two or more CD20 binding regions of the multivalent CD20-binding molecule, (2) have a transmembrane domain, and (3) remain physically coupled to the cell. In some embodiments, the cell is a CD20 positive cell. For certain embodiments, the cell is physically coupled with a significant amount of extracellular CD20 which (1) have the extracellular part bound by the two or more CD20 binding regions of the multivalent CD20-binding molecule. For certain embodiments, the cell is a descendant or member of a B-cell lineage. For certain embodiments, the cell is a malignant B-cell, B-cell leukemia cell, B-cell lymphoma cell, B-cell myeloma cell, acute myeloid leukemia cell, acute non-lymphocytic leukemia cell, B-cell chronic lymphocytic leukemia cell, B-cell lymphoma cell, B-cell non-Hodgkin's lymphoma cell, B-cell precursor acute lymphoblastic leukemia cell, B-cell prolymphocytic leukemia cell, Burkitt's lymphoma cell, chronic lymphocytic leukemia cell, chronic myeloid leukemia cell, diffuse large B-cell lymphoma cell, follicular lymphoma cell, hairy cell leukemia cell, Hodgkin's lymphoma cell, immunoblastic large cell lymphoma cell, mantle cell lymphoma cell, melanoma cell, multiple myeloma cell, neoplastic plasma cell, nodular lymphocyte predominant Hodgkin's lymphoma cell, non-Hodgkin's lymphoma cell, plasmablastic lymphoma cell, plasma cell myeloma cell, precursor B-lymphoblastic lymphoma cell, small lymphocytic lymphoma cell, malignant T-cell, T-cell leukemia cell, T-cell lymphoma cell, T-cell large granular lymphocyte leukemia cell, T-cell prolymphocytic leukemia, healthy B-cell lineage cell, or healthy T-cell.

[0536] Also provided herein is a method of inducing cellular internalization of a multivalent CD20-binding molecule into a plurality of cells physically coupled with CD20, which have the extracellular part bound by two or more CD20 binding regions of the multivalent CD20-binding molecule, the method comprising the step of contacting the plurality of cells with a multivalent CD20-binding molecule as described herein, a multivalent CD20-binding molecule composition as described herein, a solvate as described herein, a salt as described herein, a pharmaceutical composition as described herein, and/or a diagnostic composition as described herein. In some embodiments of the inducing cellular internalization method, the step of contacting the cell(s) occurs in vitro. For certain other embodiments, the step of contacting the cell(s) occurs in vivo, such as, e.g., within a patient. In some embodiments of the inducing cellular internalization method, the cellular internalization of the multivalent CD20-binding molecule occurs in about five hours, four hours, three hours, two hours, one hour, thirty minutes, or less at a physiological temperature appropriate for the cell and/or at about 37 degrees Celsius. In some embodiments, members of the plurality of cells express at a cellular surface the CD20 which (1) have the extracellular part bound by the two or more CD20 binding regions of the multivalent CD20-binding molecule, (2) have a transmembrane domain, and (3) remain physically coupled to the cell. In some embodiments, members of the plurality of cells are CD20 positive cells. For certain embodiments, the members of the plurality of cells are physically coupled with a significant amount of extracellular CD20 which (1) have the extracellular part bound by the two or more CD20 binding regions of the multivalent CD20-binding molecule. For certain embodiments, members of the plurality of cells are descendants or members of a B-cell lineage. For certain embodiments, members of the plurality of cells are malignant B-cell, B-cell leukemia cell, B-cell lymphoma cell, B-cell myeloma cell, acute myeloid leukemia cell, acute non-lymphocytic leukemia cell, B-cell chronic lymphocytic leukemia cell, B-cell lymphoma cell, B-cell non-Hodgkin's lymphoma cell, B-cell precursor acute lymphoblastic leukemia cell, B-cell prolymphocytic leukemia cell, Burkitt's lymphoma cell, chronic lymphocytic leukemia cell, chronic myeloid leukemia cell, diffuse large B-cell lymphoma cell, follicular lymphoma cell, hairy cell leukemia cell, Hodgkin's lymphoma cell, immunoblastic large cell lymphoma cell, mantle cell lymphoma cell, melanoma cell, multiple myeloma cell, neoplastic plasma cell, nodular lymphocyte predominant Hodgkin's lymphoma cell, non-Hodgkin's lymphoma cell, plasmablastic lymphoma cell, plasma cell myeloma cell, precursor B-lymphoblastic lymphoma cell, small lymphocytic lymphoma cell, malignant T-cell, T-cell leukemia cell, T-cell lymphoma cell, T-cell large granular lymphocyte leukemia cell, T-cell prolymphocytic leukemia, healthy B-cell lineage cell, or healthy T-cell members.

[0537] Also provided herein is a method of internalizing a cell surface localized CD20 bound by a multivalent CD20-binding molecule as described herein, the method comprising the step of contacting a cell(s) having cell surface localized CD20, which have the extracellular part bound by two or more CD20 binding regions of the multivalent CD20-binding molecule, with a multivalent CD20-binding molecule as described herein, a multivalent CD20-binding molecule composition as described herein, pharmaceutical composition as described herein, and/or a diagnostic composition as described herein. In some embodiments of the method of internalizing cell surface localized CD20, the step of contacting the cell(s) occurs in vitro. For certain other embodiments, the step of contacting the cell(s) occurs in vivo, such as, e.g., within a patient. In some embodiments of the of the method of internalizing cell surface localized CD20, the internalization of cell surface localized CD20 occurs in about five hours, four hours, three hours, two hours, one hour, thirty minutes, or less at a physiological temperature appropriate for the cell and/or at about 37 degrees Celsius. In some embodiments, the cell expresses at a cellular surface the CD20 which (1) have the extracellular part bound by the two or more CD20 binding regions of the multivalent CD20-binding molecule, (2) have a transmembrane domain, and (3) remain physically coupled to the cell. In some embodiments, the cell is a CD20 positive cell. For certain embodiments, the cell is physically coupled with a significant amount of extracellular CD20 which (1) have the extracellular part bound by the two or more CD20 binding regions of the multivalent CD20-binding molecule. For certain embodiments, the cell is a descendant or member of a B-cell lineage. For certain embodiments, the cell is a malignant B-cell, B-cell leukemia cell, B-cell lymphoma cell, B-cell myeloma cell, acute myeloid leukemia cell, acute non-lymphocytic leukemia cell, B-cell chronic lymphocytic leukemia cell, B-cell lymphoma cell, B-cell non-Hodgkin's lymphoma cell, B-cell precursor acute lymphoblastic leukemia cell, B-cell prolymphocytic leukemia cell, Burkitt's lymphoma cell, chronic lymphocytic leukemia cell, chronic myeloid leukemia cell, diffuse large B-cell lymphoma cell, follicular lymphoma cell, hairy cell leukemia cell, Hodgkin's lymphoma cell, immunoblastic large cell lymphoma cell, mantle cell lymphoma cell, melanoma cell, multiple myeloma cell, neoplastic plasma cell, nodular lymphocyte predominant Hodgkin's lymphoma cell, non-Hodgkin's lymphoma cell, plasmablastic lymphoma cell, plasma cell myeloma cell, precursor B-lymphoblastic lymphoma cell, small lymphocytic lymphoma cell, malignant T-cell, T-cell leukemia cell, T-cell lymphoma cell, T-cell large granular lymphocyte leukemia cell, T-cell prolymphocytic leukemia, healthy B-cell lineage cell, or healthy T-cell.

[0538] Also provided herein is a method of internalizing a cell surface localized CD20 bound by a multivalent CD20-binding molecule, the method comprising the step of contacting a plurality of cells having cell surface localized CD20, which have the extracellular part bound by two or more CD20 binding regions of the multivalent CD20-binding molecule, with a multivalent CD20-binding molecule as described herein, a multivalent CD20-binding molecule composition as described herein, pharmaceutical composition as described herein, and/or a diagnostic composition as described herein. In some embodiments of the method of internalizing cell surface localized CD20, the step of contacting the plurality of cells occurs in vitro. For certain other embodiments, the step of contacting the plurality of cells occurs in vivo, such as, e.g., within a patient. In some embodiments of the of the method of internalizing cell surface localized CD20, the internalization of cell surface localized CD20 occurs in a majority of the cells of the plurality of cells in about five hours, four hours, three hours, two hours, one hour, thirty minutes, or less at a physiological temperature appropriate for the cell and/or at about 37 degrees Celsius. In some embodiments, members of the plurality of cells express at a cellular surface the CD20 which (1) have the extracellular part bound by the two or more CD20 binding regions of the multivalent CD20-binding molecule, (2) have a transmembrane domain, and (3) remain physically coupled to the cell. In some embodiments, members of the plurality of cells are CD20 positive cells. For certain embodiments, the members of the plurality of cells are physically coupled with a significant amount of extracellular CD20 which (1) have the extracellular part bound by the two or more CD20 binding regions of the multivalent CD20-binding molecule. For certain embodiments, members of the plurality of cells are descendants or members of a B-cell lineage. For certain embodiments, members of the plurality of cells are malignant B-cell, B-cell leukemia cell, B-cell lymphoma cell, B-cell myeloma cell, acute myeloid leukemia cell, acute non-lymphocytic leukemia cell, B-cell chronic lymphocytic leukemia cell, B-cell lymphoma cell, B-cell non-Hodgkin's lymphoma cell, B-cell precursor acute lymphoblastic leukemia cell, B-cell prolymphocytic leukemia cell, Burkitt's lymphoma cell, chronic lymphocytic leukemia cell, chronic myeloid leukemia cell, diffuse large B-cell lymphoma cell, follicular lymphoma cell, hairy cell leukemia cell, Hodgkin's lymphoma cell, immunoblastic large cell lymphoma cell, mantle cell lymphoma cell, melanoma cell, multiple myeloma cell, neoplastic plasma cell, nodular lymphocyte predominant Hodgkin's lymphoma cell, non-Hodgkin's lymphoma cell, plasmablastic lymphoma cell, plasma cell myeloma cell, precursor B-lymphoblastic lymphoma cell, small lymphocytic lymphoma cell, malignant T-cell, T-cell leukemia cell, T-cell lymphoma cell, T-cell large granular lymphocyte leukemia cell, T-cell prolymphocytic leukemia, healthy B-cell lineage cell, or healthy T-cell members.

[0539] In some embodiments, provided herein is a method of inducing cellular internalization of a cell surface localized CD20 bound by a multivalent CD20-binding molecule in a subject, the method comprising the step of administering to the subject a multivalent CD20-binding molecule as described herein, a multivalent CD20-binding molecule composition as described herein, pharmaceutical composition as described herein, and/or a diagnostic composition as described herein.

[0540] Additionally, provided herein is a method for delivering an exogenous material to the inside of a cell, the method comprising the step of contacting the cell(s), either in vitro or in vivo, with a multivalent CD20-binding molecule as described herein which comprises an additional exogenous material, a multivalent CD20-binding molecule composition as described herein comprising a multivalent CD20-binding molecule as described herein which comprises an additional exogenous material, a pharmaceutical composition as described herein comprising a multivalent CD20-binding molecule as described herein which comprises an additional exogenous material, and/or a diagnostic composition as described herein comprising a multivalent CD20-binding molecule as described herein which comprises an additional exogenous material. In some embodiments, the cell is physically coupled with CD20 which have the extracellular part bound by two or more CD20 binding regions of the multivalent CD20-binding molecule. In some embodiments, the cell expresses at a cellular surface the CD20 which (1) have the extracellular part bound by the two or more CD20 binding regions of the multivalent CD20-binding molecule, (2) have a transmembrane domain, and (3) remain physically coupled to the cell. In some embodiments, the cell is a CD20 positive cell. For certain embodiments, the cell is physically coupled with a significant amount of extracellular CD20 which (1) have the extracellular part bound by the two or more CD20 binding regions of the multivalent CD20-binding molecule. For certain embodiments, the cell is a descendant or member of a B-cell lineage. For certain embodiments, the cell is a malignant B-cell, B-cell leukemia cell, B-cell lymphoma cell, B-cell myeloma cell, acute myeloid leukemia cell, acute non-lymphocytic leukemia cell, B-cell chronic lymphocytic leukemia cell, B-cell lymphoma cell, B-cell non-Hodgkin's lymphoma cell, B-cell precursor acute lymphoblastic leukemia cell, B-cell prolymphocytic leukemia cell, Burkitt's lymphoma cell, chronic lymphocytic leukemia cell, chronic myeloid leukemia cell, diffuse large B-cell lymphoma cell, follicular lymphoma cell, hairy cell leukemia cell, Hodgkin's lymphoma cell, immunoblastic large cell lymphoma cell, mantle cell lymphoma cell, melanoma cell, multiple myeloma cell, neoplastic plasma cell, nodular lymphocyte predominant Hodgkin's lymphoma cell, non-Hodgkin's lymphoma cell, plasmablastic lymphoma cell, plasma cell myeloma cell, precursor B-lymphoblastic lymphoma cell, small lymphocytic lymphoma cell, malignant T-cell, T-cell leukemia cell, T-cell lymphoma cell, T-cell large granular lymphocyte leukemia cell, T-cell prolymphocytic leukemia, healthy B-cell lineage cell, or healthy T-cell.

[0541] In some embodiments, a method of delivering an exogenous material to the inside of a cell comprises the step of administering to a subject a multivalent CD20-binding molecule as described herein which comprises an additional exogenous material, a multivalent CD20-binding molecule composition as described herein comprising a multivalent CD20-binding molecule as described herein which comprises an additional exogenous material, a pharmaceutical composition as described herein comprising a multivalent CD20-binding molecule as described herein which comprises an additional exogenous material, and/or a diagnostic composition as described herein comprising a multivalent CD20-binding molecule as described herein which comprises an additional exogenous material. In some embodiments, the cell is physically coupled with CD20 which have the extracellular part bound by two or more CD20 binding regions of the multivalent CD20-binding molecule. In some embodiments, the cell expresses at a cellular surface the CD20 which (1) have the extracellular part bound by the two or more CD20 binding regions of the multivalent CD20-binding molecule, (2) have a transmembrane domain, and (3) remain physically coupled to the cell. In some embodiments, the cell is a CD20 positive cell. For certain embodiments, the cell is physically coupled with a significant amount of extracellular CD20 which (1) have the extracellular part bound by the two or more CD20 binding regions of the multivalent CD20-binding molecule. For certain embodiments, the cell is a descendant or member of a B-cell lineage. For certain embodiments, the cell is a malignant B-cell, B-cell leukemia cell, B-cell lymphoma cell, B-cell myeloma cell, acute myeloid leukemia cell, acute non-lymphocytic leukemia cell, B-cell chronic lymphocytic leukemia cell, B-cell lymphoma cell, B-cell non-Hodgkin's lymphoma cell, B-cell precursor acute lymphoblastic leukemia cell, B-cell prolymphocytic leukemia cell, Burkitt's lymphoma cell, chronic lymphocytic leukemia cell, chronic myeloid leukemia cell, diffuse large B-cell lymphoma cell, follicular lymphoma cell, hairy cell leukemia cell, Hodgkin's lymphoma cell, immunoblastic large cell lymphoma cell, mantle cell lymphoma cell, melanoma cell, multiple myeloma cell, neoplastic plasma cell, nodular lymphocyte predominant Hodgkin's lymphoma cell, non-Hodgkin's lymphoma cell, plasmablastic lymphoma cell, plasma cell myeloma cell, precursor B-lymphoblastic lymphoma cell, small lymphocytic lymphoma cell, malignant T-cell, T-cell leukemia cell, T-cell lymphoma cell, T-cell large granular lymphocyte leukemia cell, T-cell prolymphocytic leukemia, healthy B-cell lineage cell, or healthy T-cell.

[0542] In some embodiments, the cell, cells, and population of cells referred to as (1) “cell”; (2) “cell physically coupled with CD20”; (3) “cell expressing, at a cellular surface, CD20”; (4) “CD20 positive cell”; (5) “plurality of cells”; (6) “plurality of cells physically coupled with CD20”; (7) “population of cells”; (8) “population of CD20 positive cells”; or (9) “one or more cells” are a cell, cells, or population of cells that (a) is physically coupled with extracellular CD20; (b) expresses at a cellular surface the CD20 which (i) have the extracellular part bound by the two or more CD20 binding regions of the CD20-binding molecule, (ii) have a transmembrane domain, and (iii) remain physically coupled to the cell(s); (c) is a CD20 positive; (d) is physically coupled with a significant amount of extracellular CD20 which have the extracellular part bound by the two or more CD20 binding regions of the CD20-binding molecule; (e) is a descendant or member of a B-cell lineage; (f) is cultured in a laboratory setting, is a member of an immortalized cell line, is a member of a laboratory cell strain, and/or is a member of an established human cell line; and/or (g) is one or more of the following: malignant B-cell, B-cell leukemia cell, B-cell lymphoma cell, B-cell myeloma cell, acute myeloid leukemia cell, acute non-lymphocytic leukemia cell, B-cell chronic lymphocytic leukemia cell, B-cell lymphoma cell, B-cell non-Hodgkin's lymphoma cell, B-cell precursor acute lymphoblastic leukemia cell, B-cell prolymphocytic leukemia cell, Burkitt's lymphoma cell, chronic lymphocytic leukemia cell, chronic myeloid leukemia cell, diffuse large B-cell lymphoma cell, follicular lymphoma cell, hairy cell leukemia cell, Hodgkin's lymphoma cell, immunoblastic large cell lymphoma cell, mantle cell lymphoma cell, melanoma cell, multiple myeloma cell, neoplastic plasma cell, nodular lymphocyte predominant Hodgkin's lymphoma cell, non-Hodgkin's lymphoma cell, plasmablastic lymphoma cell, plasma cell myeloma cell, precursor B-lymphoblastic lymphoma cell, small lymphocytic lymphoma cell, malignant T-cell, T-cell leukemia cell, T-cell lymphoma cell, T-cell large granular lymphocyte leukemia cell, T-cell prolymphocytic leukemia, healthy B-cell lineage cell, and/or healthy T-cell, including a laboratory culture of any of the aforementioned.

[0543] The use of any composition as described herein for the diagnosis, prognosis, and/or characterization of a disease, disorder, and/or condition is within the scope as described herein. Among certain embodiments as described herein is the use of one or more compositions of matter as described herein (e.g. a pharmaceutical composition as described herein) in the treatment or prevention of a cancer, tumor, abnormal growth condition, and/or immune disorder. Among certain embodiments as described herein is the use of one or more compositions of matter described herein (e.g. a solvate, salt, or pharmaceutical composition as described herein) in the manufacture of a medicament for the treatment or prevention of a cancer, tumor, abnormal growth condition, and/or immune disorder. Among certain embodiments as described herein is a cytotoxic protein or a pharmaceutical composition comprising said protein for use in the treatment or prevention of a cancer, tumor, or immune disorder.

[0544] Further provided herein are methods of treating diseases, disorders, and/or conditions in subjects, the methods comprising the step of administering to a subject in need thereof a therapeutically effective amount of a CD20-binding molecule as described herein, a CD20-binding molecule composition as described herein, a solvate as described herein, a salt as described herein, and/or a pharmaceutical composition as described herein. For certain embodiments of these treatment methods described herein, the disease, disorder, or condition to be treated using a method described herein involves a cell, cancer cell, tumor cell, and/or immune cell which express CD20 at a cellular surface. For certain embodiments of these treatment methods described herein, the disease, disorder, or condition to be treated using a method described herein is a cancer, tumor, abnormal growth condition, and/or immune disorder. For certain embodiments of these treatment methods described herein, the disease to be treated is hematologic cancer, leukemia, lymphoma, melanoma, or myeloma. For certain embodiments of these treatment methods described herein, the immune disorder to be treated is amyloidosis, ankylosing spondylitis, asthma, Crohn's disease, diabetes, graft rejection, graft-versus-host disease, Graves' disease, Graves' ophthalmopathy, Hashimoto's thyroiditis, hemolytic uremic syndrome, HIV-related diseases, lupus erythematosus, multiple sclerosis, neuromyelitis optica spectrum disorders, N-methyl D-aspartate (NMDA) receptor encephalitis, opsoclonus myoclonus syndrome (OMS), paroxysmal nocturnal hemoglobinuria, polyarteritis nodosa, polyarthritis, psoriasis, psoriatic arthritis, rheumatoid arthritis, scleritis, scleroderma, septic shock, Sjorgren's syndrome, ulcerative colitis, and vasculitis. For certain embodiments of these treatment methods as described herein, the cancer to be treated is acute myeloid leukemia (acute myelogenous leukemia or AML), acute non-lymphocytic leukemia, B-cell chronic lymphocytic leukemia (B-cell CLL), B-cell lymphoma, B-cell non-Hodgkin's lymphoma (B-cell NHL), B-cell precursor acute lymphoblastic leukemia (BCP-ALL or B-ALL), B-cell prolymphocytic leukemia (B-PLL), Burkitt's lymphoma (BL), chronic lymphocytic leukemia (CLL), chronic myeloid leukemia (CML), diffuse large B-cell lymphoma (DLBCL or DLBL), follicular lymphoma (FL), hairy cell leukemia (HCL), Hodgkin's lymphoma (HL or HD), immunoblastic large cell lymphoma, mantle cell lymphoma (MCL), multiple myeloma (MM), nodular lymphocyte predominant Hodgkin's lymphoma (NLPHL), non-Hodgkin's lymphoma (NHL), plasmablastic lymphoma, plasma cell neoplasma, plasma cell myeloma, precursor B-lymphoblastic lymphoma (B-LBL), small lymphocytic lymphoma (SLL), T-cell large granular lymphocyte leukemia (T-LGLL), T-cell lymphoma (TCL), T-cell prolymphocytic leukemia (T-PLL), or Waldenström's macroglobulinemia (WM).

[0545] Among certain embodiments as described herein is a method of producing a CD20-binding molecule as described herein and/or CD20-binding molecule composition, the method comprising the step of purifying a CD20-binding molecule or protein component thereof using an affinity purification step, such as, e.g., based on a chitin binding interaction. In some embodiments, the affinity purification step uses a chitin binding interaction. In some embodiments, the purifying step of the method involves the molecule comprising, consisting essentially of, or consisting of any one of the molecules shown in SEQ ID NOs: 4-304.

[0546] Among certain embodiments as described herein is a method of producing a CD20-binding molecule as described herein and/or CD20-binding molecule composition as described herein, the method comprising the step of oxidizing a CD20-binding molecule and/or a composition comprising a CD20-binding molecule. In some embodiments, the oxidizing step of the method uses a metal oxide or metal carboxylate as a catalyst. In some embodiments, the oxidizing step of the method uses copper sulfate as a catalyst. For certain embodiments, the oxidizing step of the method involves the CD20-binding molecule comprising, consisting essentially of, or consisting of any one of the molecules shown in SEQ ID NOs: 47-175 and 249-304.

[0547] Among certain embodiments as described herein is a method of using a CD20-binding protein described herein comprising a detection promoting agent for the collection of information useful in the diagnosis, prognosis, or characterization of a disease, disorder, or condition. Among certain embodiments as described herein is a method of detecting a cell using a CD20-binding protein and/or diagnostic composition described herein, the method comprising the steps of contacting a cell with the CD20-binding protein and/or diagnostic composition described herein and detecting the presence of the CD20-binding molecule and/or diagnostic composition. For certain embodiments, the step of contacting the cell(s) occurs in vitro and/or ex vivo. For certain embodiments, the step of contacting the cell(s) occurs in vivo. For certain embodiments, the step of detecting the cell(s) occurs in vitro and/or ex vivo. For certain embodiments, the step of detecting the cell(s) occurs in vivo.

[0548] The present invention is further illustrated by the following non-limiting illustrative examples of cytotoxic CD20-binding molecules and compositions comprising selectively cytotoxic CD20-binding molecules comprising Shiga toxin effector regions derived from A Subunits of members of the Shiga toxin family and at least one CD20 binding region capable of binding extracellular parts of CD20 physically coupled to specific, CD20-expressing cell types.

### EXAMPLES

[0549] The following Examples describe different CD20-binding molecules comprising Shiga toxin A Subunit effector polypeptides. Illustrative, CD20-binding molecules as described herein 1) bound to CD20 expressed at the surface of target cell types, such as, e.g., human lymphoma cells or healthy primate B-cells, 2) entered target cells and effectively routed catalytically active, Shiga toxin effector polypeptide to the cytosol of target cells resulting in the death of these CD20-expressing cells.

[0550] The illustrative CD20-binding molecule compositions as described herein, which were enriched with high-proportions of multivalent CD20-binding molecule(s) relative to monovalent CD20-binding molecule(s), showed greater cytotoxic activity compared to a protein composition predominantly composed of a monovalent CD20-binding protein, which was a component of the illustrative CD20-binding molecules as described herein shown in Example 1. The improved cytotoxic effects of illustrative CD20-binding molecule compositions as described herein could not be accounted for by predicted increases in cytotoxicity resulting from increases in the CD20-binding valences of the CD20-binding molecule variants as compared to the monovalent CD20-binding molecule.

[0551] Throughout the Examples, the term “CD20-binding protein” is used to refer to a Shiga toxin A Subunit derived, immunotoxin comprising one or more recombinant fusion polypeptides, which each comprise 1) one or more immunoglobulin-type CD20 binding regions capable of binding an extracellular part of a CD20 with high affinity, and 2) one or more Shiga toxin effector polypeptides. Certain CD20-binding proteins as described herein shown in the Examples below were multimeric, such as, e.g., a homodimer consisting essentially of two, identical, monovalent CD20-binding proteins which are coupled together.

### Example 1. Illustrative, Multivalent CD20-Binding Proteins as Described Herein and Enriched Compositions Thereof

[0552] Illustrative, multivalent CD20-binding molecules as described herein were created by linking multiple, CD20-binding, single-chain, variable fragment (scFv) polypeptides with multiple, Shiga toxin A Subunit effector polypeptides using reagents and techniques known to the skilled worker. In this Example, the illustrative, multivalent CD20-binding molecules as described herein were multivalent CD20-binding proteins which each comprised 1) two or more single-chain, variable fragment (scFv), binding regions capable of binding an extracellular CD20 with high affinity linked with 2) two or more Shiga toxin A Subunit derived toxin effector regions.

[0553] Multivalent CD20-binding proteins were designed, produced, and purified using techniques known to the skilled worker to create protein compositions where the predominant protein(s) in the composition were multivalent CD20-binding proteins as described herein. For example, the illustrative compositions (αCD20-scFv::SLT-1A)₂ and (αCD20-scFv::SLT-1A)₂₊ₙ were predominantly composed of proteins that were multivalent CD20-binding proteins as described herein. As shown below, illustrative, multivalent, CD20-binding protein compositions as described herein were capable, via the activity of their multivalent CD20-binding protein constituent(s), of selectively killing cells that express CD20 on their surface by internalizing, routing a toxin effector region to the cytosol, and inactivating ribosomes.

[0554] However, the protein composition αCD20-scFv::SLT-1A, which was predominantly composed of monovalent CD20-binding protein representing a component of the multivalent CD20-binding proteins of this Example, did not exhibit potent, CD20-targeted cytotoxicity over a wide-range of protein concentrations. The monovalent CD20-binding protein composition αCD20-scFv::SLT-1A was unexpectedly found to be inactive at concentrations with similar total molecule binding levels to CD20-expressing cells as concentrations of illustrative, multivalent CD20-binding protein compositions as described herein at which these illustrative multivalent CD20-binding protein compositions exhibited potent targeted-cytotoxicity to CD20-expressing cells. This was surprising because the monovalent CD20-binding protein 1) had the same CD20 binding region and Shiga toxin effector region as the illustrative, multivalent CD20-binding proteins and 2) exhibited a similar catalytic activity in vitro as the illustrative, multivalent CD20-binding proteins.

### A. Construction, Production, and Purification of Cytotoxic, Multivalent, CD20-Binding Proteins to Produce the Composition (αCD20-scFv::SLT-1A)ₙ

[0555] In this Example, the Shiga toxin effector region was derived from the A Subunit of Shiga-like toxin 1 (SLT-1A). A polynucleotide was obtained that encoded amino acids 1-251 of SLT-1A (Cheung M et al., Mol Cancer 9: 28 (2010)). Immunoglobulin-type binding regions comprising single-chain variable fragments (scFv) αCD20-scFv were derived from a monoclonal antibody, developed to bind human CD20, such that a single-chain variable fragment was created with the two immunoglobulin variable regions (V_{L} and V_{H}) separated by a linker known in the art. The immunoglobulin-type binding region and the Shiga toxin effector region were cloned in frame to form a genetically fused protein.

[0556] A polynucleotide encoding the Shiga toxin effector region comprising the polypeptide shown in SEQ ID NO:4 (corresponding to amino acids 1-251 of SEQ ID NO:1) was cloned in frame with a polynucleotide encoding an immunoglobulin-type binding region αCD20-scFv. In certain experiments, the full-length coding sequence of the subunit of the multivalent cytotoxic proteins of this Example included a polynucleotide encoding a myc tag or Strep-Tag® II to facilitate detection and/or purification. A polynucleotide encoding an αCD20-scFv::SLT-1A fusion protein subunit (SEQ ID NO:54) of the multivalent CD20-binding protein(s) of the illustrative protein composition “(αCD20-scFv::SLT-1A)ₙ” were synthesized using services from DNA 2.0, Inc. (Menlo Park, Calif., U.S.) or cloned using standard techniques.

[0557] CD20-binding proteins comprising the constituents of the protein composition (αCD20-scFv::SLT-1A)ₙ were produced by protein expression from the polynucleotide template encoding the protein αCD20-scFv::SLT-1A (SEQ ID NO:54) using a bacterial system or cell-free expression system known in the art. Protein purification was accomplished using standard techniques known in the art, including capto-L and chitin affinity chromatography. For certain purifications, multivalent CD20-binding proteins were produced in bacteria and purified with the IMPACT™ (Intein Mediated Purification with an Affinity Chitin-binding Tag) system (New England Biolabs, Ipswich, Mass., U.S.). Chitin affinity purification was performed according to the manufacturer's instructions except in certain purifications, a protein L column chromatography step was performed and then the intein was cleaved. Then uncleaved material was removed using chromatography through a chitin resin in flow-through mode.

[0558] After purification, the (αCD20-scFv::SLT-1A)ₙ protein composition was oxidized using copper sulfate as a catalyst. Then, the oxidized (αCD20-scFv::SLT-1A)ₙ composition was purified into three different CD20-binding protein compositions using hydroxyapatite (hydroxylapatite) chromatography. Hydroxyapatite chromatography was used to separate different monomeric and multimeric forms of the CD20-binding proteins of the (αCD20-scFv::SLT-1A)ₙ composition into different chromatographic fractions and then certain fractions were pooled—one protein pool named “αCD20-scFv::SLT-1A composition” predominantly comprised the monovalent CD20-binding protein αCD20-scFv::SLT-1A (n=1); another protein pool named “(αCD20-scFv::SLT-1A)2 composition” predominantly comprised monospecific, bivalent CD20-binding protein (n=2) and represents an illustrative, multivalent CD20-binding molecule composition as described herein; and a third protein pool predominantly comprised monospecific, multivalent CD20-binding proteins of various sizes (n=2, 3, 4, 5, 6, etc.) with only a minority of the size of a bivalent CD20-binding protein. The third protein pool was further purified to reduce the amounts of monovalent CD20-binding protein αCD20-scFv::SLT-1A and bivalent CD20-binding protein using a second hydroxyapatite chromatography purification step followed by a size exclusion chromatography step and chromatographic fraction collection. Certain fractions comprising molecular sizes estimated to be large than bivalent CD20-binding protein were pooled to create the illustrative, multivalent CD20-binding molecule composition as described herein named “(αCD20-scFv::SLT-1A)ₙ₊₂ composition” (i.e. n+2≥3). The three protein pools (CD20-binding protein compositions) were individually concentrated.

[0559] The protein makeup of each of the three CD20-binding protein compositions (1) αCD20-scFv::SLT-1A, (2) (αCD20-scFv::SLT-1A)2, and (3) (αCD20-scFv::SLT-1A)ₙ₊₂ was analyzed by size exclusion chromatography (SEC) using a Superdex 200 30/300 column (GE Healthcare, Little Chalfont, Buckinghamshire, U.K.) with a 24 mL bed volume (FIG. 2; Table 3). For the SEC chromatographic analysis, each sample was loaded and then at least 24 mL of buffer was flowed through the column while an ultraviolet (uv) light detector monitored the absorbance at 280 nanometers (nm) of the eluted materials as reported in milli-absorbance units (mAU) (FIG. 2; Table 3). Generally, smaller-sized molecules are retarded when flowing through matrices used for size exclusion chromatography as compared to larger-sized molecules and, therefore, smaller-sized molecules exhibit longer, SEC retention times than larger-sized molecules. Thus, the measuring of SEC retention times can provide an estimate of the relative proportion(s) of differently-sized molecular constituents within in a composition, and, thus, the purity of a composition with regard to molecular constituents of certain sizes.

TABLE 3
Size Exclusion Chromatographic Analysis of Purified Compositions
Having Different Forms of αCD20-scFv::SLT-1A: Relative
proportions of different monomeric and multimeric
αCD20-scFv::SLT-1A structures

| | Monomer | Dimer | MultimersD |
|---|---|---|---|
| αCD20-scFv::SLT-1A pool | 95.0% | 5.0% | 0.0% |
| (αCD20-scFv::SLT-1A)₂ pool | 0.0% | 79.0% | 21.0% |
| (αCD20-scFv::SLT-1A)₂₊ₙ pool | 3.0% | 9.0% | 88.0% |
| average retention (mL) | 15.5 | 13.8 | 12.1 |

*“Multimers > Dimer” refers to a class of multivalent CD20-binding protein multimers of sizes larger than a dimer

[0560] Table 3 shows the relative proportions of three different classes of CD20-binding protein present in the protein compositions as differentiated by size: 1) αCD20-scFv::SLT-1A class, (2) (αCD20-scFv::SLT-1A)₂ class, and (3) (αCD20-scFv::SLT-1A)ₙ₊₂ class. The αCD20-scFv::SLT-1A composition comprised 95 percent monomeric CD20-binding protein of the total protein present, and each of these monomeric CD20-binding proteins was monovalent for CD20 binding. The (αCD20-scFv::SLT-1A)₂ composition did not comprise any measurable amount of monomeric CD20-binding protein instead comprising 100 percent multivalent CD20-binding protein of the total protein present. For the (αCD20-scFv::SLT-1A)₂ composition, 79 percent of the protein present was dimeric and 21 percent of the protein present was the size of a multimeric form(s) greater than the size of any dimeric form. Finally, the analysis showed that the (αCD20-scFv::SLT-1A)₂₊ₙ composition comprised mostly multivalent CD20-binding protein of molecular sizes greater than the size of a dimeric form (88 percent of the total protein was of a size greater than the size of a dimer), but this composition also comprised a minor proportion of dimeric form(s) of multivalent CD20-binding protein and an even smaller proportion of the monomeric CD20-binding protein. The dimeric form(s) of the CD20-binding protein present in these three compositions represent illustrative, multivalent CD20-binding protein(s) as described herein that are both bivalent and multimeric.

[0561] The three CD20-binding protein compositions (1) αCD20-scFv::SLT-1A, (2) (αCD20-scFv::SLT-1A)₂, and (3) (αCD20-scFv::SLT-1A)ₙ₊₂ were also analyzed by SDS polyacrylamide gel electrophoresis (SDS-PAGE). A sample from each of the three purified protein compositions was subjected to reducing conditions of 42 millimolar (mM) dithiolthreitol (DTT) and denatured at 95° C. for 5 minutes to investigate the presence of reducible covalent bonds, such as, e.g. cysteine disulfide bonds, linking proteinaceous components of the multivalent CD20-binding proteins present in the compositions. Samples were diluted with 3×SDS Blue Loading Buffer (187.5 mM Tris-HCl (pH 6.8), 6% mass/volume percentage (w/v) sodium dodecyl sulfate (SDS), 30% glycerol and 0.03% (w/v) bromophenol blue, Catalog #B7703S, New England BioLabs, Inc., Ipswich, Mass., U.S.) or 3×SDS Reducing Blue Loading Buffer (187.5 mM Tris-HCl (pH 6.8), 6% (w/v) SDS, 30% glycerol, 0.03% (w/v) bromophenol blue, and 125 mM DTT, Catalog #B7703 S, New England BioLabs, Inc., Ipswich, Mass., U.S.) to a final composition of 1× buffer and mixed well. The samples were heated at 95° C. for 5 minutes and then 5 micrograms (μg) of protein sample per well was loaded into wells of a 4-20% SDS polyacrylamide gel and subjected to electrophoresis.

[0562] Samples of both reduced and non-reduced purified protein pools were analyzed in denaturing conditions by SDS-PAGE (FIG. 3). FIG. 3 shows images of a Coomassie-stained, 4-20% SDS-PAGE gel (Lonza, Basel, CH) with the lanes of the gel numbered and the figure legend indicating which sample was loaded into each lane by the same respective numbering. Multimeric forms of the multivalent CD20-binding proteins present in a sample whose subunits are associated only from non-covalent interactions were expected to dissociate into their component monovalent proteins in this denaturing gel analysis regardless of redox state due to the nature of the SDS-PAGE technique performed. In contrast, multimeric forms of the multivalent CD20-binding proteins present in a sample that result from reducible covalent bonds, such as, e.g., cysteine disulfide bridge-dependent forms, might be observed to dissociate into proteinaceous components in reduced samples but not in unreduced samples. However, in both situations incomplete, disulfide bond reduction and/or protein denaturation could permit the persistence of multimeric structures.

[0563] The electrophoresis analysis showed that the majority proteinaceous species in the αCD20-scFv::SLT-1A composition migrated at a molecular mass of about 55 kDa (FIG. 3), which was the approximate size expected for SEQ ID NO:54, which has an anti-CD20 scFv fused to the Shiga toxin A Subunit effector polypeptide SLT-1A 1-251. The size of this species was unchanged between non-reducing and reducing conditions (FIG. 3). These results were consistent with the majority protein species in the αCD20-scFv::SLT-1A composition as being the monomeric, monovalent CD20-binding protein component of the illustrative, multivalent CD20-binding protein compositions of this Example.

[0564] The electrophoresis analysis showed that the majority proteinaceous species in the (αCD20-scFv::SLT-1A)₂ composition migrated at a molecular mass of about 110 kDa (FIG. 3, lane 5), which was the approximate size expected for a dimeric form consisting of exactly two of the monomeric, monovalent CD20-binding proteins of the αCD20-scFv::SLT-1A composition. There was also a minority proteinaceous species present in the (αCD20-scFv::SLT-1A)₂ composition which migrated at a molecular mass of about 55 kDa under non-reducing conditions and might represent the monomeric, monovalent CD20-binding protein component αCD20-scFv::SLT-1A after the denaturation of a dimeric form(s) that result from one or more non-covalent association(s) but not any covalent linkage(s), such as, e.g., a cysteine disulfide bond. The size of the vast majority of this majority species changed to about 55 kDa under reducing conditions (FIG. 3, lane 5), which was consistent with the existence, under non-reducing conditions, of one or more disulfide bonds linking two, monomeric, monovalent CD20-binding protein molecules together in a dimeric form(s) for the majority protein species present in the (αCD20-scFv::SLT-1A)₂ composition.

[0565] The electrophoresis analysis showed that the majority proteinaceous species in the (αCD20-scFv::SLT-1A)₂+. composition migrated at a molecular mass of about 55 kDa or 110 kDa (FIG. 3, lane 7), which was the approximate size expected for either the monomeric, monovalent CD20-binding protein component αCD20-scFv::SLT-1A or a dimeric form(s) consisting of exactly two monovalent CD20-binding protein components. The size of the vast majority of the dimeric protein species changed to about 55 kDa under reducing conditions (FIG. 3, lane 6), which was consistent with the existence, under non-reducing conditions, of one or more disulfide bonds linking two, monovalent CD20-binding protein molecules together in a dimeric form(s) in the (αCD20-scFv::SLT-1A)₂₊ₙ composition.

[0566] The comparison of the reduced and non-reduced samples electrophoretically separated through SD S-PAGE gels under denaturing showed that the compositions (αCD20-scFv::SLT-1A)₂ and (αCD20-scFv::SLT-1A)ₙ₊₂ included both covalent and non-covalent multimers (FIG. 3, lanes 4-7). These illustrative compositions of multivalent CD20-binding proteins as described herein, (αCD20-scFv::SLT-1A)₂ and (αCD20-scFv::SLT-1A)ₙ₊₂ comprise multivalent CD20-binding proteins which have covalently linked, protein subunits and/or non-covalent linked protein subunits.

### B. Determining the Cell-Binding Characteristics of Multivalent CD20-Binding Proteins Present in Illustrative Compositions

[0567] The binding characteristics of the multivalent CD20-binding protein compositions (αCD20-scFv::SLT-1A)₂ and (αCD20-scFv::SLT-1A)ₙ₊₂ to human tumor-derived, cell lines were studied using a fluorescence-based, flow-cytometry assay. The protein compositions (αCD20-scFv::SLT-1A)₂ and (αCD20-scFv::SLT-1A)ₙ₊₂, which were produced as described above, were analyzed for the ability of their multimeric, multivalent CD20-binding proteins having Shiga toxin effector regions to bind to human tumor-derived, cell lines that express human CD20 at a cellular surface.

[0568] Samples containing CD20 positive (CD20+) Raji cells or CD20 negative (CD20-) U266 cells were suspended in 1×PBS containing one percent bovine serum albumin (BSA) (Calbiochem, San Diego, Calif., U.S.), hereinafter referred to as “1×PBS+1% BSA” and incubated for one hour at 4 degrees Celsius (° C.) with 100 microliters (μL) of various dilutions of the multivalent CD20-binding protein compositions to be assayed. After the one-hour incubation, samples comprising a mixture of cells and a multivalent CD20-binding protein composition were washed twice with 1×PBS+1% BSA. Then the samples were incubated for one hour at 4° C. with 100 μL of 1×PBS+1% BSA solution comprising a murine monoclonal antibody anti-SLT-1A (BEI NR-867 BEI Resources, Manassas, Va., U.S.; cross reactive with Shiga toxin and Shiga-like toxin 1 A subunits) at an antibody concentration larger than the total protein concentration present in each sample. The samples were washed with 1×PBS+1% BSA and then incubated in the same manner with an anti-mouse IgG secondary antibody conjugated with FITC at an antibody concentration larger than the total protein concentration present in each sample. Then the samples were washed twice with 1×PBS+1% BSA, resuspended in 200 μL of 1×PBS, and subjected to fluorescence-based, flow cytometry in order to measure protein binding to the cells.

[0569] The maximum specific binding (Borax) and equilibrium binding constants (K_{D}) of αCD20-scFv::SLT-1A, (αCD20-scFv::SLT-1A)₂ and (αCD20-scFv::SLT-1A)ₙ₊₂ samples to human tumor-derived, cell lines were determined as follows. The mean fluorescence intensity (MFI) data from the fluorescence-based, flow cytometry for all the samples was obtained by gating the data using a cell sample incubated only with the secondary antibody as a negative control. Graphs were plotted of the MFI data versus “concentration of protein” using Prism software (GraphPad Software, San Diego, Calif., U.S.) (FIG. 4). Using the Prism software function of one-site binding [Y=Bₘₐₓ*X/(K_{D}+X)] under the heading binding-saturation, the Bₘₐₓ and K_{D} were calculated using baseline corrected data. Light absorbance (Abs) values were corrected for background by subtracting the Abs values measured for wells containing only PBS. Bₘₐₓ is the maximum specific binding reported in MFI. K_{D} is the equilibrium binding constant, reported in nanograms per milliliter (ng/mL). The K_{D} and Bₘₐₓ values for the compositions (αCD20-scFv::SLT-1A)₂ and (αCD20-scFv::SLT-1A)ₙ₊₂ are reported in Table 4 and shown in FIG. 4.

TABLE 4
Binding of Illustrative, Multivalent αCD20-scFv::SLT-1A Compositions
described herein to CD20+ Raji Cells as Compared to a Monovalent
CD20-Binding Protein Composition

| Protein Composition | Bₘₐₓ (MFI) | K_{D} (ng/mL) |
|---|---|---|
| (αCD20-scFv::SLT-1A)₂ dimer | 167,728 | 180.2 |
| (αCD20-scFv::SLT-1A)ₙ₊₂ | 147,366 | 176.9 |
| αCD20-scFv::SLT-1A monomer | 178,118 | 544.1 |

[0570] The Bₘₐₓ for (CD20-scFv::SLT-1A)₂ binding to CD20⁺ Raji cells was measured to be about 170,000 MFI with a K_{D} of about 180 ng/mL (Table 4; FIG. 4). The Bₘₐₓ for (CD20-scFv::SLT-1A)ₙ₊₂ binding to CD20⁺ Raji cells was measured to be about 150,000 MFI with a K_{D} of about 180 ng/mL (Table 4; FIG. 4). Thus, illustrative protein compositions as described herein (αCD20-scFv::SLT-1A)₂ and (αCD20-scFv::SLT-1A)ₙ₊₂ (which were predominantly composed of multimeric, multivalent CD20-binding proteins) both exhibited high-affinity binding to human CD20-expressing human cells expressing CD20 at a cell surface (e.g. CD20⁺ human cells). It is unknown whether any multimeric form of CD20-scFv::SLT-1A present in either the (αCD20-scFv::SLT-1A)₂ or (αCD20-scFv::SLT-1A)ₙ₊₂ compositions is capable of simultaneously binding two, different, CD20 target biomolecules present at the cell surface of a single, CD20-expressing cell.

C. Determining the Half-Maximal Inhibitory Concentration (IC₅₀) of the Proteins (αCD20-scFv::SLT-1A)₂ and (αCD20-scFv::SLT-1A)ₙ₊₂ to Eukaryotic Ribosomes In Vitro

[0571] The ribosome inactivation capabilities of the (αCD20-scFv::SLT-1A)₂ and (αCD20-scFv::SLT-1A)ₙ₊₂ protein compositions were determined in a cell-free, in vitro protein translation assay using the TNT® Quick Coupled Transcription/Translation Kit (L1170 Promega, Madison, Wis., U.S.). The kit includes Luciferase T7 Control DNA and TNT® Quick Master Mix. The ribosome activity reaction was prepared according to the manufacturer's instructions to create “TNT” reaction mixtures. The concentrations of CD20-binding protein present in the samples were calculated based on the molarity of the SLT-1A components (see below). A series of 10-fold dilutions of the CD20-binding protein compositions to be analyzed was prepared in an appropriate buffer, and a series of identical TNT reaction mixture components was created for each sample dilution.

[0572] Each sample in the dilution series was combined with each of the TNT reaction mixtures along with the Luciferase T7 Control DNA. The test samples were incubated for 1.5 hours at 30° C. After the incubation, Luciferase Assay Reagent (E1483 Promega, Madison, Wis., U.S.) was added to all test samples, and the amount of luciferase protein translation was measured by luminescence according to the manufacturer's instructions. The level of translational inhibition was determined by non-linear regression analysis of log-transformed molar concentrations of the total protein, estimated based on the normalized molar concentration of Shiga toxin protein versus relative luminescence units. Using statistical software (GraphPad Prism, San Diego, Calif., U.S.), the half maximal inhibitory concentration (IC50) in picomolar (pM) value was calculated for each CD20-binding protein composition tested (FIG. 5; Table 5).

TABLE 5
Ribosome Inactivation Analysis: Representative half-maximal inhibitory
concentrations (IC₅₀) of multivalent CD20-binding proteins described
herein as compared to a monovalent CD20-binding protein

| Protein | IC₅₀ (pM) |
|---|---|
| (αCD20-scFv::SLT-1A)₂ | 5.29 |
| (αCD20-scFv::SLT-1A)ₙ₊₂ | 10.74 |
| αCD20-scFv::SLT-1A monomer | 3.14 |
| SLT-1 A (1-251) only positive control | 3.15 |

[0573] The inhibitory effects of the illustrative, multivalent CD20-binding protein compositions (CD20-scFv::SLT-1A)₂ and (CD20-scFv::SLT-1A)ₙ₊₂ on cell-free protein synthesis were strong (FIG. 5; Table 5). Dose-dependence experiments determined that the IC50 values of the multivalent CD20-binding molecules present in (CD20-scFv::SLT-1A)₂ and (CD20-scFv::SLT-1A)ₙ₊₂ to protein synthesis in this cell-free assay were about 5.3 pM and 11 pM, respectively (FIG. 5; Table 5).

D. Determining the Half-Maximal Cytotoxic Concentrations (CD₅₀) of the Multivalent CD20-Binding Proteins (αCD20-scFv::SLT-1A)₂ and (αCD20-scFv::SLT-1A)ₙ₊₂ Using a CD20+ Cell-Kill Assay

[0574] Dose dependence experiments were used to determine the CD₅₀ values of the illustrative CD20-binding protein compositions as described herein (αCD20-scFv::SLT-1A)₂ and (αCD20-scFv::SLT-1A)ₙ₊₂. The cytotoxicity characteristics of the (αCD20-scFv::SLT-1A)₂ and (αCD20-scFv::SLT-1A)ₙ₊₂ compositions were determined by the following CD20+ cell-kill assay. This assay determines the capacity of a protein sample to kill cells expressing at a cellular surface the CD20 target biomolecule of the multivalent CD20-binding protein's binding region(s). CD20+ Raji cells and CD20+ST486 cells were plated (7.5×10³ cells per well) in 20 μL cell culture medium in 384-well plates. The multivalent CD20-binding protein compositions to be tested were diluted 10-fold in a 1×PBS, and 5 μL of the dilutions were added to the CD20+ and CD20− cell samples in the 384-well plates. Control wells containing only cell culture medium were used for baseline correction. The cell samples were incubated with protein samples or just buffer for three days at 37° C. and in an atmosphere of 5% carbon dioxide (CO₂). The total cell survival or percent viability was determined using a luminescent readout using the CellTiter-Glo® Luminescent Cell Viability Assay (G7573 Promega Madison, Wis., U.S.) according to the manufacturer's instructions. The Percent Viability of experimental wells was calculated using the following equation: (Test RLU−Average Media RLU)/(Average Cells RLU−Average Media RLU)*100. Log polypeptide concentration versus Percent Viability was plotted in Prism (GraphPad Prism, San Diego, Calif., U.S.) and log (inhibitor) vs. response (3 parameter) analysis were used to determine the half-maximal cytotoxic concentration (CD₅₀) value for the multivalent CD20-binding protein compositions (αCD20-scFv::SLT-1A)₂ and (αCD20-scFv::SLT-1A)ₙ₊₂ to CD20+ cells.

[0575] The CD₅₀ value of (αCD20-scFv::SLT-1A)₂ composition to CD20⁺ Raji cells was 250 ng/mL (Table 6; FIG. 6). The CD₅₀ value of the composition (αCD20-scFv::SLT-1A)ₙ₊₂ to CD20 Raji cells was about 220 ng/mL (Table 6; FIG. 6). In contrast, the CD₅₀ value of the monomeric, monovalent CD20-binding protein composition αCD20-scFv::SLT-1A was much higher (i.e. less potent) such that at the tested concentrations a CD₅₀ could not be accurately determined from the shape of the curve (Table 6, “NC” denotes not calculable; FIG. 6). For the protein concentrations and cell densities tested in this assay, it was estimated that at certain concentrations of the proteins tested, the available cell-surface CD20 present could be saturated by CD20-binding protein (see, Muller P, Brennan F, Clin Pharmacol Ther 85: 247-58 (2009), for an illustrative “RO model” used to estimate occupancy).

TABLE 6
Cytotoxicity: Representative half-maximal cytotoxic concentrations
(CD₅₀) for illustrative, multivalent CD20-binding protein
compositions as described herein to CD20+ Raji Cells

| Protein | CD₅₀ (ng/mL) |
|---|---|
| (αCD20-scFv::SLT-1A)₂ | 249.0 |
| (αCD20-scFv::SLT-1A)ₙ₊₂ | 217.7 |
| αCD20-scFv::SLT-1A | NC* |

*“NC” (not calculable) indicates that an accurate CD₅₀ could not be calculated based on the shape of the curve.

[0576] Using the same cell-kill assay, the (αCD20-scFv::SLT-1A)₂ protein composition was shown in other experiments to be nontoxic to CD20 negative cell lines, such as, e.g., BC-1, U266, and H929 cells, when tested at similar cell densities and CD20-binding protein concentrations, which included protein concentrations as high as 40,000 ng/mL. Also using the same cell-kill assay, both the SLT-1A (1-251) component alone and the monomeric, monovalent CD20-binding protein composition αCD20-scFv::SLT-1A did not exhibit specific cytotoxicity toward CD20+ Raji cells at protein concentrations as large as 24,000 ng/mL.

[0577] The cytotoxicity measurements of the monovalent CD20-binding protein composition αCD20-scFv::SLT-1A showed that αCD20-scFv::SLT-1A exhibited no greater cytotoxicity towards CD20⁺ Raji cells at the tested cell density and protein concentrations compared with the cytotoxicity of an SLT-1A (1-251) “only” negative control sample, which lacked any cell-targeting moiety like a cell-surface receptor binding region. Thus, the monovalent CD20-binding protein composition αCD20-scFv::SLT-1A exhibited only non-specific cytotoxicity regardless of cell-surface marker expression. In conclusion, the monovalent CD20-binding protein αCD20-scFv::SLT-1A was incapable of killing CD20+ cells at the protein concentrations tested; whereas, the illustrative, multivalent CD20-binding protein compositions as described herein (αCD20-scFv::SLT-1A)₂ and (αCD20-scFv::SLT-1A)ₙ₊₂ showed potent, cell-targeted cytotoxicity specifically to CD20-expressing cells.

[0578] To further investigate these unexpected results, the protein compositions αCD20-scFv::SLT-1A and (αCD20-scFv::SLT-1A)₂ were mixed together to form new compositions to test the cytotoxic potency of their constituent CD20-binding proteins as a function of the ratio of CD20-binding protein constituents. The (αCD20-scFv::SLT-1A)₂ composition comprised 100% multivalent CD20-binding protein of the total protein present and 79% of that multivalent CD20-binding protein was bivalent CD20-binding protein (see Table 3, supra). The αCD20-scFv::SLT-1A composition comprised 95% monovalent CD20-binding protein of the total protein present (see Table 3, supra). Increasingly larger samples of the multivalent CD20-binding molecule composition (αCD20-scFv::SLT-1A)₂ were added to samples of the monovalent CD20-binding protein composition αCD20-scFv::SLT-1A to create a series of mixed samples with total protein concentration ratios of 1:3, 1:1, and 3:1 of the (αCD20-scFv::SLT-1A)₂ composition to the αCD20-scFv::SLT-1A composition. Samples of the fixed-ratio, mixed samples, along with samples of the original, unmixed αCD20-scFv::SLT-1A and (αCD20-scFv::SLT-1A)₂ compositions, were tested using the CD20+ cell-kill assay as described above to determine each sample's CD₅₀ value to CD20-expressing cells (ST486). The results are shown in FIG. 7, FIG. 8, and Table 7, along with the results for the unmixed αCD20-scFv::SLT-1A and (αCD20-scFv::SLT-1A)₂ compositions. In addition, none of these samples exhibited cytotoxicity toward CD20 negative cells using this assay at the concentrations tested (FIG. 9).

TABLE 7
Cytotoxicity: Representative half-maximal cytotoxic concentrations (CD₅₀)
for the multivalent (αCD20-scFv::SLT-1A)₂ composition diluted with
increasingly more of the monovalent αCD20-scFv::SLT-1A composition

| Protein | CD₅₀ (ng/mL) |
|---|---|
| 1:0 (αCD20-scFv::SLT-1A)₂ | 61.5 |
| 3:1 (αCD20-scFv::SLT-1A)₂ to αCD20-scFv::SLT-1A | 74.9 |
| 1:1 (αCD20-scFv::SLT-1A)₂ to αCD20-scFv::SLT-1A | 108.0 |
| 1:3 (αCD20-scFv::SLT-1A)₂ to αCD20-scFv::SLT-1A | 213.0 |
| 0:1 αCD20-scFv::SLT-1A | 967.0 |
| unpurified (αCD20-scFv::SLT-1A)₂ | 142.0 |

[0579] FIG. 7 shows the CD20+ cell-kill assay results for the illustrative, multivalent CD20-binding molecule composition as described herein (αCD20-scFv::SLT-1A)₂, the monovalent CD20-binding protein composition αCD20-scFv::SLT-1A and the “unpurified” protein composition (αCD20-scFv::SLT-1A)ₙ described above before any copper sulfate oxidation step.

[0580] FIG. 8 shows the CD20+ cell-kill assay results for the fixed-ratio mixtures of a 1:3 protein concentration ratio of (αCD20-scFv::SLT-1A)₂ to αCD20-scFv::SLT-1A, a 1:1 protein concentration ratio of (αCD20-scFv::SLT-1A)₂ to αCD20-scFv::SLT-1A, and a 3:1 protein concentration ratio of (αCD20-scFv::SLT-1A)₂ to αCD20-scFv::SLT-1A, along with the original, multivalent CD20-binding protein composition (αCD20-scFv::SLT-1A)₂.

[0581] Table 7 reports the CD₅₀ values for samples of the purified (αCD20-scFv::SLT-1A)₂ composition, the mixture of a 1:3 protein concentration ratio of (αCD20-scFv::SLT-1A)₂ to αCD20-scFv::SLT-1A, the mixture of a 1:1 protein concentration ratio of (αCD20-scFv::SLT-1A)₂ to αCD20-scFv::SLT-1A, the mixture of a 3:1 protein concentration ratio of (αCD20-scFv::SLT-1A)₂ to αCD20-scFv::SLT-1A, and “unpurified” (αCD20-scFv::SLT-1A)ₙ. Table 7 shows the cytotoxicity of the purified, multivalent CD20-binding molecule composition (αCD20-scFv::SLT-1A)₂ to CD20-expressing cells was about 16 times greater than the cytotoxicity of the purified, monovalent CD20-binding protein composition αCD20-scFv::SLT-1A to CD20-expressing cells. Table 7 shows the (αCD20-scFv::SLT-1A)₂ composition was about 2.3 times more cytotoxic than the “unpurified” (αCD20-scFv::SLT-1A)ₙ composition from which the (αCD20-scFv::SLT-1A)₂ composition was purified.

[0582] The CD₅₀ values in Table 7 were graphed as a function of the percentage of (αCD20-scFv::SLT-1A)₂ composition protein of the total protein in the sample tested, and a straight line was fitted to the data points using a simple linear regression, statistical model (FIG. 10). The coefficient of determination (“R squared”) of the line fit was 0.8424. In FIG. 11, the CD₅₀ values represented in Table 7 were graphed as a function of the percentage of (αCD20-scFv::SLT-1A)₂ composition protein of the total protein in the sample.

[0583] The results reported in Table 7, FIG. 10, and FIG. 11 show that as the multivalent CD20-binding protein composition (αCD20-scFv::SLT-1A)₂ was diluted with the monovalent CD20-binding protein composition αCD20-scFv::SLT-1A, the cytotoxicity of the mixed CD20-binding protein samples was reduced, such as, e.g., by 4-fold or greater, as assayed by CD₅₀ values measured with the CD20+ cell-kill assay. FIGS. 10 and 11 show that as the relative protein concentration of the multivalent CD20-binding protein composition (αCD20-scFv::SLT-1A)₂ increases over the total CD20-binding protein concentration, the cytotoxic potency of the mixture to CD20+ cells increased (represented by lower CD₅₀ values). The cytotoxicity of the (αCD20-scFv::SLT-1A)₂ composition to CD20+ cells was diluted in linear manner by the addition of more and more of the monovalent CD20-binding protein composition αCD20-scFv::SLT-1A (see FIGS. 8, 10, and 11). Thus, for achieving more maximal cytotoxicity of a multivalent CD20-binding protein composition as described herein, the amount of any monovalent CD20-binding protein (e.g., αCD20-scFv::SLT-1A or (αCD20-scFv::SLT-1A)ₙ where n=1) or the relative proportion monovalent CD20-binding protein to total CD20-binding protein should be minimized or eliminated because a monovalent CD20-binding protein represents a cytotoxicity-lowering constituent of the composition, such as, e.g., by functioning as a non-cytotoxic impurity or a constituent having significantly lower cytotoxicity than a multivalent CD20-binding molecule comprising it as a component.

[0584] Considering that the in vitro, ribosome inhibitory activities of both monovalent and multivalent variants of the CD20-binding protein compositions were similar (see Table 5), it was expected that changes in CD20-expressing cell binding caused by differences in CD20-binding valency would account for any differences in cytotoxic potency between monovalent and multivalent CD20-binding protein. However, the lack of cytotoxic potency of the monovalent CD20-binding protein composition αCD20-scFv::SLT-1A as compared to the (αCD20-scFv::SLT-1A)₂ composition cannot be explained merely by the difference in CD20+ cell-binding between the αCD20-scFv::SLT-1A composition and the (αCD20-scFv::SLT-1A)₂ composition (see Table 4 and FIG. 4).

[0585] Using the same cell-kill assay, the fixed-ratio mixtures of CD20-binding protein compositions were analyzed for cytotoxicity to CD20 negative H929 cells (FIG. 9). The CD₅₀ values of the mixture of a 1:3 protein concentration ratio of (αCD20-scFv::SLT-1A)₂ to αCD20-scFv::SLT-1A, the mixture of a 1:1 protein concentration ratio of (αCD20-scFv::SLT-1A)₂ to αCD20-scFv::SLT-1A, and the mixture of a 3:1 protein concentration ratio of (αCD20-scFv::SLT-1A)₂ to αCD20-scFv::SLT-1A to target negative cells were not calculable because of the shape of the curve produced by the dilution series. Thus, the fixed-ratio mixtures were not cytotoxicity to CD20 negative cells at the concentrations tested; whereas, each ratio tested showed some levels of targeted cytotoxicity to CD20+ cells (Table 7; FIG. 9).

[0586] In addition, CD20+ cell-kill assays were performed as described above to test the cytotoxicity of protein compositions comprising purified, catalytically inactive, bivalent CD20-binding protein. Protein compositions, which comprised multivalent CD20-binding protein, were produced as described above for the purification and production of the composition (αCD20-scFv::SLT-1A)₂. The Shiga toxin effector polypeptide regions of the CD20-binding proteins of these compositions were catalytically inactive or catalytically impaired due to the presence of the mutation(s) E167D, Y77S, or Y77S/E167D in their Shiga toxin effector regions. The multivalent CD20-binding proteins of these compositions comprised the monovalent CD20-binding protein αCD20-scFv::SLT-1A (SEQ ID NO:54) with at least one of the mutations noted above for studying the role of catalytic activity. The catalytically inactive variants of the multivalent CD20-binding proteins were not cytotoxic at the concentrations tested. Without being bound by theory, the requirement for a catalytically active, Shiga toxin effector region for cell-killing by multivalent CD20-binding molecules of this Example showed the mechanism of cytotoxicity of certain, multivalent CD20-binding molecule, and compositions thereof, 1) is Shiga toxin effector region dependent, 2) requires the Shiga toxin activity of ribosome inactivation within the target cell, and 3) does not involve any other cytotoxic effect of the multivalent CD20-binding molecule independent of Shiga toxin effector catalytic activity (i.e., no other cytotoxic effect of the multivalent CD20-binding molecule (e.g., a Shiga toxin effector region-independent, extracellular, cytotoxic effect) was observed in the assays of this Example at the protein concentrations tested in the absence of Shiga toxin effector region catalytic activity.

### E. Determining Relative Proportions of Multivalent CD20-Binding Molecules in Illustrative Compositions

[0587] Chromatographic and/or electrophoretic methods known to the skilled worker were used to determine 1) relative protein concentration ratios of different CD20-binding proteins within illustrative compositions as described herein.

[0588] In this Example, SEC analyses were used to analyze the amount of proteinaceous species of different sizes present in illustrative compositions as described herein, e.g., the ratios and/or percentages between monovalent, bivalent, and higher-order multivalent CD20-binding species were calculated.

[0589] SEC analyses were performed using the following assays. Samples were loaded onto a fast protein liquid chromatography (FPLC) column and buffer was flowed through the column while the absorbance at 280 nm of the eluted materials was recorded in mAU. Using the same column and setup, molecules of known sizes and migration characteristics (standards) were analyzed in order to calibrate which retention times corresponded to which protein sizes and/or protein sizes were predicted from the amino acid composition of each monovalent CD20-binding protein monomer present in the composition to be analyzed. Chromatographic data collected from commercial size standards were used to create calibration curves to help estimate sizes of molecular species in samples and focus analyses on specific retention time ranges. In certain instances of high purity, the total protein quantity for a given composition was estimated using the absorbance measurement at 280 nm from a SEC analysis, the predicted molecular weight of the majority molecular species present, and the extinction coefficient of that majority species.

[0590] In addition, SDS-PAGE and/or capillary gel electrophoretic analyses of both reduced and non-reduced samples was used to verify the sizes, estimate the relative quantities, and detect any disulfide bond, multimeric associations present in the molecular species of a given size or peak (see e.g. FIG. 3). For example, the size of a molecule in a SEC peak can be estimated based on non-reducing SDS-PAGE analysis of chromatographic fractions collected at retention times within that peak's retention duration.

[0591] In this Example, all the CD20-binding proteins in the illustrative compositions as described herein consisted essentially of monovalent CD20-binding protein and/or a multimeric form(s) of a monovalent CD20-binding protein(s). Thus, peaks and bands corresponding to species: 1) the same size of the monovalent CD20-binding protein were composed of monovalent CD20-binding molecule, 2) twice as large as the monovalent CD20-binding protein were composed of bivalent CD20-binding molecule(s), 3) three times as large as the monovalent CD20-binding protein were composed of trivalent CD20-binding molecule(s), and so forth.

[0592] Some SEC analyses involved assays performed with an ÄKTA system (GE Healthcare, Little Chalfont, Buckinghamshire, U.K.). UNICORN™ control software (GE Healthcare, Little Chalfont, Buckinghamshire, U.K.) was used to calculate the protein concentration percentages of different sized-species using the software's peak integration functions, which included baseline calculation, determination of the start and end of peaks, the retention time and the area under the curve. The identity of the CD20-binding protein species represented by a peak in the 280 nm trace from a chromatographic analysis were manually assigned based on the expected retention time determined using calibration standards (e.g. a gel filtration standard like GE Healthcare Life Science's product 28-4038-42 Gel Filtration HMW Calibration Kit).

[0593] Other SEC analyses involved a similar assay performed with a Waters system (Waters Corp., Milford, Mass., U.S.). SEC analysis was performed using a Waters Alliance HPLC system running Water Empower 2 software (Waters Corp., Milford, Mass., U.S.). The HPLC system included an analytical TSKgel G3000SW_{XL} size-exclusion column and a TSKgel Guard SW_{XL} size-exclusion guard column (Tosoh Bioscience LLC, King of Prussia, Pa., U.S.). Prior to use, the columns were equilibrated with mobile phase (20 mM sodium phosphate, 500 mM sodium chloride, pH 7.4) for at least thirty minutes at a flow rate of 0.5 mL per minute (mL/min). A blank sample of 100 μL of mobile phase was run through the columns to check the system was clean and working properly. Then composition samples were analyzed, including samples of known protein size standards (e.g. a commercially available, gel filtration standard like GE Healthcare Life Science's product 28-4038-42 Gel Filtration BMW Calibration Kit). For each composition sample, 50 μg of protein was injected and an isocratic pump was run for thirty minutes at a flow-rate of 0.5 mL per minute though the columns at a temperature of 22° C.

[0594] The percentages of multivalent CD20-binding molecule present in three, different, illustrative compositions as described herein were analyzed by SEC using the Waters system (see FIG. 12, panel A, panel B, and panel C), and the respective results of these analyses are shown in Tables 6-8. In this Example for the Waters system, a retention time of (1) about 19 to 20 minutes represented a molecular size equivalent to dimeric, bivalent CD20-binding protein (αCD20-scFv::SLT-1A)₂; (2) about 20 to 22 minutes represented a molecular size equivalent to the monomeric, monovalent CD20-binding protein αCD20-scFv::SLT-1A; (3) about 17 to 17.5 minutes represented a molecular size equivalent to multimeric CD20-binding proteins which were trivalent or tetravalent; and 4) about 17 minutes represented a molecular size equivalent to multimeric, hexavalent CD20-binding protein. The percent purity of the dimeric, bivalent CD20-binding protein (αCD20-scFv::SLT-1A)₂ was calculated from its peak area divided by the total peak area of all peaks from 14 to 27 minutes. The percentage of each peak to all peaks (Percent Area of Total) was determined using the sum of all peak areas as the denominator as shown in the following formula: (area under the curve of the peak of interest)/(sum of all areas under all peaks)×100.

TABLE 8
SEC Analysis of Illustrative, Multivalent CD20-Binding Molecule
Composition #1

| Peak | Peak Retention | Peak Height | | Percent Area |
|---|---|---|---|---|
| Number | Time (minutes) | (AU) | Peak Area | of Total (%) |
| #1 | 17.12 | 11,120 | 870,189 | 8.79 |
| #2 | 17.55 | 11,947 | 546,273 | 5.52 |
| #3 | 19.30 | 162,857 | 7,713,993 | 77.88 |
| #4 | 20.65 | 14,999 | 774,762 | 7.82 |

TABLE 9
SEC Analysis of Illustrative, Multivalent CD20-Binding Molecule
Composition #2

| Peak | Peak Retention | Peak Height | | Percent Area |
|---|---|---|---|---|
| Number | Time (minutes) | (AU) | Peak Area | of Total (%) |
| #1 | 17.49 | 9,138 | 597,819 | 7.51 |
| #2 | 19.32 | 148,854 | 7,003,742 | 87.95 |
| #3 | 20.87 | 6,418 | 361,658 | 4.54 |

TABLE 10
SEC Analysis of Illustrative, Multivalent CD20-Binding Molecule
Composition #3

| Peak | Peak Retention | Peak Height | | Percent Area |
|---|---|---|---|---|
| Number | Time (minutes) | (AU) | Peak Area | of Total (%) |
| #1 | 17.57 | 7,148 | 381,654 | 4.74 |
| #2 | 19.52 | 128,928 | 7,264,891 | 90.26 |
| #3 | 20.87 | 8,268 | 402,467 | 5.00 |

[0595] The results of the Percent Area of Total calculations shown in Tables 8-10 are based on the SEC profile data shown in FIG. 12A-12C. Table 8 shows the results for one, illustrative, multivalent CD20-binding molecule composition as described herein having a bivalent CD20-binding protein percentage of total protein of approximately 78%, as well as comprising about 8% monovalent CD20-binding protein and 14% relatively large valence, CD20-binding protein of the total protein. Table 9 shows the results for a second, illustrative, multivalent CD20-binding molecule composition as described herein having a bivalent CD20-binding protein percentage of total protein approximately 88%, as well as comprising about 4.5% monovalent CD20-binding protein and 7.5% relatively large valence, CD20-binding protein of the total protein. Table 10 shows the results for an illustrative, multivalent CD20-binding molecule composition as described herein having a bivalent CD20-binding protein percentage of total protein of approximately 90%, as well as comprising about 5% monovalent CD20-binding protein and 5% relatively large valence, CD20-binding protein of the total protein.

[0596] One illustrative, multivalent CD20-binding molecule composition as described herein (“multivalent CD20-binding molecule composition #1”) was analyzed 59 different times over an eighteen-month period using the SEC-HPLC, Waters system assay described above. The peak areas and total peak area were determined using the software analysis as described above with the minimum retention time set around 14 minutes (near the exclusion limit where molecules are too large to have any significant probability of penetrating the fractionation gel) and the maximum retention time set around 22-27 minutes, depending on calibration measurements of gel filtration standard markers and the multivalent CD20-binding molecule composition's solvent, which is near when molecules of sizes smaller than polypeptides flow off the column. The resulting empirical measurements produced a data set (n=59) describing peak #3 (bivalent CD20-binding protein as described herein) area to total peak (total protein) area (Percent Area of Total) with a mean of 77.40 (%), a median of 77.72 (%), a mode of 76.10 (%), a standard deviation of 1.533, and a relative standard deviation of 1.982. An illustrative, individual analysis of the illustrative, multivalent CD20-binding molecule composition #1 is shown in Table 8 and FIG. 12 A.

F. Determining the In Vivo Effects of Multivalent CD20-Binding Molecule Compositions (αCD20-scFv::SLT-1A)₂ and (αCD20-scFv::SLT-1A)ₙ₊₂ Using Animal Models

[0597] Using methods known to the skilled worker, animal models are used to determine the in vivo effects of the illustrative compositions (αCD20-scFv::SLT-1A)₂ and (αCD20-scFv::SLT-1A)ₙ₊₂ on CD20+ neoplastic and/or immune cells (see e.g. WO 2014/164680). Various mice strains are used to test the effects of the multivalent CD20-binding molecules as described herein, and compositions thereof, after intravenous administration on xenograft tumors in mice resulting from the injection into those mice of human neoplastic cells which express CD20 on at least one of their cell surfaces. Non-human primates are used to test the effects of the multivalent CD20-binding molecule compositions on CD20+B-cell populations after intravenous administration.

### Summary

[0598] Surprisingly, multivalent CD20-binding molecules as described herein, which each comprise cell-targeting, CD20 binding regions and Shiga toxin A subunit effector polypeptide regions, exhibit an unexpected improvement in CD20-expressing cell-kill activity compared to their monovalent protein component.

[0599] Given their similar ribosome inactivation activities, it was expected that differences in cytotoxic potencies between monovalent and multivalent variants would be predominantly if not completely explained by differences in the variants' abilities to binding CD20-expressing cells. The difference in K_{D} values for binding CD20-expressing cells between the bivalent CD20-binding molecule composition (CD20-scFv::SLT-1A)₂ of this Example and the monovalent CD20-binding protein composition αCD20-scFv::SLT-1A was about 3-fold with the bivalent CD20-binding molecule composition exhibiting the lower K_{D} value or about a three times greater binding affinity (Table 4; FIG. 4). Thus, if cytotoxic potency of CD20-binding molecule was directly related to the K_{D} of cell binding, then the cytotoxicity of the monovalent CD20-binding protein composition was predicted to be at most 3-fold less cytotoxic to CD20+ cells than the illustrative, bivalent CD20-binding molecule composition—meaning the expected CD₅₀ value of the monovalent CD20-binding protein should be no more than about three times the CD₅₀ value of the illustrative, bivalent CD20-binding molecule composition.

[0600] However, it was discovered instead that the monovalent CD20-binding protein composition did not exhibit a cytotoxicity within ten-fold of the cytotoxicity of compositions of multivalent CD20-binding molecules having that same monovalent CD20-binding protein as its only component. Surprisingly, the difference in cytotoxicity was qualitatively increased as by the assay described above, and this cytotoxic difference, while over ten-fold, has yet to be accurately quantified. Without being bound by theory, the increased cytotoxicity of the multivalent CD20-binding protein compositions of this Example might be caused by a qualitative change in the ability of multivalent CD20-binding molecules compared to monovalent CD20-binding molecules to do one or more of the following: 1) internalize into CD20-expressing cells, such as, e.g., with relatively great efficiency; 2) intracellular route to subcellular compartment(s) favorable for effectuating Shiga toxin effector polypeptide mediated cytotoxicity, such as, e.g., with relatively great efficiency; and/or 3) delivery of Shiga toxin effector polypeptides to the cytosol of cell in which the multivalent CD20-binding molecule is present, such as, e.g., with relatively great efficiency.

### Example 2. CD20-Binding Molecules Derived from Shiga Toxins and Various Immunoglobulin-Type Binding Regions, and Compositions Thereof

[0601] In this Example, illustrative compositions are created with multivalent CD20-binding proteins derived from Shiga toxin. A Shiga toxin effector region is derived from the A subunit of Shiga-like Toxin 1 (SLT-1A) (SEQ ID NO:1), Shiga toxin (StxA) (SEQ ID NO:2), and/or Shiga-like Toxin 2 (SLT-2A) (SEQ ID NO:3) or chosen from a Shiga toxin effector known in the art (see e.g., WO 2005/092917, WO 2007/033497, US 2013/196928, WO 2014/164680, WO 2014/164693, WO 2015/113005, WO 2015/113007, WO 2015/138435, WO 2015/138452, US 2015/259428, WO 2015/191764, and US 2016/0177284, each of which is incorporated herein by reference in its entirety). An immunoglobulin-type binding region is derived from the CD20-binding molecule chosen from Table 11 and which binds an extracellular part of CD20. The illustrative, multivalent CD20-binding molecules of this Example are created using techniques known in the art and/or as described in the previous Example. In addition, illustrative compositions enriched for these illustrative, multivalent CD20-binding molecules relative to monovalent CD20-binding molecule(s) are created using techniques known in the art and/or as described in the previous Example such that the compositions have a concentration ratio of monovalent CD20-binding molecule to total CD20-binding molecule concentration of less than one to three. The illustrative, multivalent CD20-binding molecules, and compositions thereof, of this Example are tested as described in the previous Example and/or using assays known to the skilled worker.

TABLE 11
Illustrative CD20 Binding Domains
Source of CD20 Binding Domain

| | |
|---|---|
| monoclonal antibody 1F5 and derivatives | See e.g. Golay J et al., J Immunol |
| such as, e.g., humanized variants and | 135: 3795-801 (1985); Press O et |
| immunoglobulin-derived binding domains | al., Blood 69: 584-91 (1987) |
| like scFvs | |
| monoclonal antibody 1H4 and derivatives | See e.g. Haisma H et al., Blood |
| such as, e.g., humanized variants and | 92: 184-90 (1998) |
| immunoglobulin-derived binding domains | |
| like scFvs | |
| monoclonal antibody 1K1791 and derivatives | See e.g. Nishida M et al., Intl J |
| such as, e.g., humanized variants and | Oncol 32: 1263-74 (2008) |
| immunoglobulin-derived binding domains | |
| like scFvs | |
| monoclonal antibody 2B8, Leu16, Leuδ, and | See e.g. Reff M et al., Blood 83: |
| derivatives such as, e.g., humanized variants | 435-45 (1994); Maloney D et al., |
| and immunoglobulin-derived binding | Blood 84: 2457-66 (1994); WO |
| domains like scFvs | 2005016969 |
| monoclonal antibody 2F2 and derivatives | See e.g. Teeling J et al., Blood |
| such as, e.g., humanized variants and | 104: 1793-800 (2004) |
| immunoglobulin-derived binding domains | |
| like scFvs | |
| monoclonal antibody 2H7 and derivatives | See e.g. Liu A et at., Proc Natl |
| such as, e.g., humanized variants and | Acad Sci 84: 3439-43 (1987); |
| immunoglobulin-derived binding domains | Polyak M et al., Blood 99: 3256- |
| like scFvs | 62 (2002); Nickerson-Nutter C et |
| | al., Rheumatology 50: 1033-44 |
| | (2011) |
| monoclonal antibody 7D8 and derivatives | See e.g. Teeling J et al., Blood |
| such as, e.g., humanized variants and | 104: 1793-800 (2004) |
| immunoglobulin-derived binding domains | |
| like scFvs | |
| monoclonal antibody 8E4 and derivatives | Wu L et al., Cancer Lett 292: |
| such as, e.g., humanized variants and | 208-14 (2010) |
| immunoglobulin-derived binding domains | |
| like scFvs | |
| monoclonal antibody 11B8 and derivatives | See e.g. Boross P et al., |
| such as, e.g., humanized variants and | Haematologica 96: 1822-30 |
| immunoglobulin-derived binding domains | (2011) |
| like scFvs | |
| monoclonal antibody AME-133v, | See e.g. Robak T, Robak E, |
| LY2469298, and derivatives such as, e.g., | BioDrugs 25: 13-25 (2011) |
| humanized variants and immunoglobulin- | |
| derived binding domains like scFvs | |
| antibodies recognizing the phosphor-CD20 | See e.g. Golay J et al., J Immunol |
| antigen B1, B-1y1 and derivatives such as, | 135: 3795-801 (1985); Tedder T |
| e.g., humanized variants and | et al., Eur J Immunol 16: 881-7 |
| immunoglobulin-detived binding domains | (1986); Cardarelli P et al., |
| like scFvs | Cancer Immunol Immunother 51: |
| | 15-24 (2002); U.S. Pat. No. |
| | 5,843,398 |
| monoclonal antibody B9E9 and derivatives | See e.g. Schultz J et al., Cancer |
| such as, e.g., humanized variants and | Res 60: 6663-9 (2000) |
| immunoglobulin-derived binding domains | |
| like scFvs | |
| BM-ca and derivatives such as, e.g., | See e.g. Kobayashi H et al., |
| humanized variants and immunoglobulin- | Cancer Med 2: 130-43 (2013 |
| derived binding domains like scFvs ( | |
| monoclonal antibody C2B8 and derivatives | See e.g. Reff M et al., Blood 83: |
| such as, e.g., humanized variants and | 435-45 (1994) |
| immunoglobulin-derived binding domains | |
| like scFvs | |
| monoclonal antibody CKI and derivatives | See e.g. Hooijberg E et al., |
| such as, e.g., humanized variants and | Cancer Res 55: 840-6 (1995); |
| immunoglobulin-derived binding domains | Hooijberg E et al., Hybridoma |
| like scFvs | 15: 23-31 (1996) |
| GA101, RO5072759, and derivatives such as, | See e.g. Mössner E et al., Blood |
| e.g., humanized variants and | 115: 4393-402 (2010); Alduaij W |
| immunoglobulin-derived binding domains | et al., Blood 117: 4519-29 |
| like scFvs | (2011); Robak T, Robak E, |
| | BioDrugs 25: 13-25 (2011); |
| | Salles Get al., Blood 119: 5126- |
| | 32 (2012) |
| monoclonal antibody LT20 and derivatives | See e.g. de Boer O et al., PLoS |
| such as, e.g., humanized variants and | One 2: e779 (2007) |
| immunoglobulin-derived binding domains | |
| like scFvs | |
| ibritumomab and derivatives such as, e.g., | See e.g. Wiseman G et al., Clin |
| humanized variants and immunoglobulin- | Cancer Res 5: 3281s-3286s |
| derived binding domains like scFvs | (1999); Cang S et al., J Hematol |
| | Oncol 5: 64 (2012) |
| monoclonal antibodies HB20-1-25, MB20-1- | See e.g. WO2005000901 |
| 18 and derivatives such as, e.g., humanized | |
| variants and immunoglobulin-derived binding | |
| domains like scFvs | |
| obinutuzumab and derivatives such as, e.g., | See e.g. Mössner E et al., Blood |
| humanized variants and immunoglobulin- | 115: 4393-402 (2010); Robak T, |
| derived binding domains like scFvs | Robak E, BioDrugs 25: 13-25 |
| | (2011); Salles G et al., Blood |
| | 119: 5126-32 (2012); Golay J et |
| | al., Blood 122: 3482-91 (2013) |
| ocaratuzumab and derivatives such as, e.g., | Cang S et al., J Hematol Oncol 5: |
| humanized variants and immunoglobulin- | 64 (2012) |
| derived binding domains like scFvs | |
| ocrelizumab, PRO70769, and derivatives such | See e.g. Morschhauser F et al., |
| as, e.g., humanized variants and | Ann Oncol 21: 1870-6 (2010); |
| immunoglobulin-derived binding domains | Cang S et al., J Hematol Oncol 5: |
| like scFvs | 64 (2012) |
| ofatumumab and derivatives such as, e.g., | See e.g. Hagenbeek A et al., |
| immunoglobulin-derived binding domains | Blood 111: 5486-95 (2008); |
| like scFvs | Cang S et al., J Hematol Oncol 5: |
| | 64 (2012) |
| monoclonal antibodies OUBM1-OUBM8 | See e.g. Uchiyama S et al., |
| | Cancer Sci 101: 201-9 (2010) |
| monoclonal antibody PRO131921 and | See e.g. Robak T, Robak E, |
| derivatives such as, e.g., humanized variants | BioDrugs 25: 13-25 (2011); |
| and immunoglobulin-derived binding | Cang S et al., J Hematol Oncol 5: |
| domains like scFvs | 64 (2012) |
| rituximab and derivatives such as, e.g., | See e.g. Reff M et al., Blood 83: |
| humanized variants and immunoglobulin- | 435-45 (1994); Anderson D et |
| derived binding domains like scFvs | al., Biochem Soc Trans 25: 705-8 |
| | (1997); Golay J et al., Blood 122: |
| | 3482-91 (2013); Kinder M et al., |
| | J Biol Chem 288: 3084-54 |
| | (2013); Zhang H et al., Cell |
| | Physiol Biochem 32: 645-54 |
| | (2013); Ahmadzadeh V et al., |
| | Protein Expr Purif 102: 45-41 |
| | (2014) |
| antibody TGLA and derivatives such as, e.g., | See e.g. Lv M et al., Cancer Lett |
| humanized variants and immunoglobulin- | 294: 66-73 (2010) |
| derived binding domains like scFvs | |
| tositumomab and derivatives such as, e.g., | See e.g. Cheson B, Curr Opin |
| humanized variants and immunoglobulin- | Investig Drugs 3: 165-70 (2002) |
| derived binding domains like scFvs | |
| TRU-015 and derivatives such as, e.g., | See e.g. Burge D et al., Clin Ther |
| humanized variants, scFv variants, and CDRs | 30: 1806-16 (2008); Robak T, |
| | Robak E, BioDrugs 25: 13-25 |
| | (2011)) |
| ublituximab and derivatives such as, e.g., | See e.g. Abdelwahed R et al., |
| humanized variants and immunoglobulin- | Invest Ophthalmol Vis Sci 54: |
| derived binding domains like scFvs | 3657-65 (2013); Garff-Tavernier |
| | M et al., Leukemia 28: 230-3 |
| | (2014) |
| veltuzumab, IMMU-106, hA20, and | See e.g. Morschhauser F et al., J |
| derivatives such as, e.g., humanized variants | Clin Oncol 27: 3346-53 (2009); |
| and immunoglobulin-derived binding | Cang S et al., J Hematol Oncol 5: |
| domains like scFvs | 64 (2012); Ellbrecht C et al., |
| | JAMA Dermatol 1939 (2014) |
| CD20 binding scFv(s) and derivatives such as, | See e.g. Geng S et al., Cell Mol |
| e.g., HL23, scFv-1, scFv-3, scFv-5, and scFv- | Immunol 3: 439-43 (2006); |
| 8 | Olafesn T et al., Protein Eng Des |
| | Sel 23: 243-9 (2010); Fang H et |
| | al., Sci China Life Sci 54: 255-62 |
| | (2011) |
| various CD20 binding antibodies, antigen | See e.g. Lim S et al., |
| binding portions thereof, and derivatives such | Haematologica 95: 135-43 |
| as, e.g., humanized variants and | (2010); U.S. Pat. No. 4,861,579; U.S. Pat. No. |
| immunoglobulin-derived binding domains | 5,500,362; U.S. Pat. No. 5,595,721; U.S. Pat. No. |
| like scFvs | 5,677,180; U.S. Pat. No. 5,721,108; U.S. Pat. No. |
| | 5,736,137; U.S. Pat. No. 5,776,456; U.S. Pat. No. |
| | 5,843,398; U.S. Pat. No. 5,849,898; U.S. Pat. No. |
| | 6,015,542; U.S. Pat. No. 6,090,365; U.S. Pat. No. |
| | 6,120,767; U.S. Pat. No. 6,171,586; U.S. Pat. No. |
| | 6,194,551; U.S. Pat. No. 6,224,866; U.S. Pat. No. |
| | 6,242,195; U.S. Pat. No. 6,287,537; U.S. Pat. No. |
| | 6,306,393; U.S. Pat. No. 6,368,596; U.S. Pat. No. |
| | 6,399,061; U.S. Pat. No. 6,410,391; U.S. Pat. No. |
| | 6,455,043; U.S. Pat. No. 6,528,624; U.S. Pat. No. |
| | 6,538,124; U.S. Pat. No. 6,565,827; U.S. Pat. No. |
| | 6,652,852; U.S. Pat. No. 6,682,734; U.S. Pat. No. |
| | 7,879,984; U.S. Pat. No. 8,101,179; U.S. Pat. No. |
| | 8,153,125; U.S. Pat. No. 8,337,844; |
| | WO95/03770; WO98/58964; |
| | WO99/22764; WO00/09160; |
| | WO00/27428; WO00/27433; |
| | WO00/42072; WO00/44788; |
| | WO00/67795; WO00/67796; |
| | WO00/76542; WO01/03734; |
| | WO01/10460; WO01/10461; |
| | WO01/10462; WO01/13945; |
| | WO01/72333; WO01/80884; |
| | WO01/97858; WO02/060955; |
| | WO02/079255; WO02/096948; |
| | WO02/102312; WO03/002607; |
| | WO03/061694; |
| | WO2004/032828; |
| | WO2005/000901; |
| | WO2006/106959; |
| | WO2009031230; |
| | WO2014076292 |
| CD20 binding, fibronectin domain FN3_{CD20} | See e.g. Natarajan A et al., Clin |
| based on the fibronectin-derived 10^{th} | Cance Res 19: 6820-9 (2013); |
| fibronectin type III domain as an alternative | |
| scaffold to antibody binding domains | |
| monoclonal antibodies which bind to various | U.S. 2011/0091483; U.S. |
| mammalian CD20 antigens | 12/0941,583; |
| | PCT/US2010/055826; |
| | EP20140151932; |
| | PCT/GB2012/052532; U.S. |
| | 13/048,135; EP20140151932; |
| | PCT/GB2012/052532; U.S. |
| | 13/048,135; |
| | PCT/US2006/046034 |
| nucleic acids which can be used to generate | U.S. Pat. No. 8,097,713; U.S. 12/0965956 |
| anti-CD20 antibodies, antigen binding | |
| fragments, and derivatives thereof | |

### Example 3. Formulation of a CD20-Binding Molecule

[0602] Molecule 001, an illustrative CD20-binding molecule, is a homodimer of two polypeptides, each polypeptide having the amino acid sequence of SEQ ID NO:54, wherein the two polypeptides are covalently joined by a disulfide bond at position 503. A pharmaceutical composition of Molecule 001 is formulated in an aqueous sodium citrate buffer and contains the following: Molecule 001 (0.5 mg/mL), sodium citrate (United States Pharmacopeia (USP), 4.5 mg/mL), citric acid (USP, 1 mg/mL), sorbitol (National Formulary (NF), 36.4 mg/mL), polysorbate 20 (NF, 0.1% v/v), and sodium hydroxide (USP) and hydrochloric acid (NF), as needed, to adjust the pH to between 5.3 to 5.7.

[0603] The pharmaceutical composition of Molecule 001 is shipped in a frozen form to clinical sites and stored in frozen form at −20±5° C. in a freezer. Once thawed, Molecule 001 should not be re-frozen. The stability of Molecule 001 is about 60 months at −20° C., about 31 days at 2 to 8° C., and about 24 hours at room temperature.

[0604] For each patient, the daily dose of the pharmaceutical composition is calculated based on body weight. A 100 mL infusion bag with 5% dextrose in water for injection (D5W) or normal saline (NS) is prepared by using a syringe to withdraw and remove the amount of D5W or NS from the bag that is equivalent to a calculated single dose drug product volume. This eliminated volume of D5W or NS is then restored by the calculated volume of the Molecule 001 pharmaceutical composition such that the total volume in the infusion bag is again 100 mL. The pharmaceutical composition of Molecule 001 is provided in Table 12 below.

TABLE 12
Pharmaceutical Composition of 1 mL of Molecule 001

| Ingredient | Amount | | Function | Specification |
|---|---|---|---|---|
| Molecule 001 | 0.50 | mg | Active Ingredient | As described |
| | | | | herein |
| Sodium Citrate | 4.5 | mg | Buffering agent, | USP |
| | | | conjugated base | |
| Citric Acid | 1.0 | mg | Buffering agent, | USP |
| | | | acid | |
| Sorbitol | 36.4 | mg | Cryogenic | NF |
| | | | protectant | |
| Polysorbate 20 | 0.001 | mL | Surfactant | NF |
| | | | stabilizer | |
| Water for Injection | q.s. to 1 | mL | Solvent | WFI (USP) |

| | | | |
|---|---|---|---|
| Sodium Chloride | As needed to | Base, adjust pH | USP |
| | adjust to pH 5.3 to | | |
| | 5.7 | | |
| Hydrochloric Acid | As needed to | Acid, adjust pH | NF |
| | adjust to pH 5.3 to | | |
| | 5.7 | | |

USP = United States Pharmacopeia
NF = National Formulary
q.s. = as much as is sufficient

### Example 4. Combination Therapy Using CD20 Binding Protein and Sirolimus (Rapamycin)

[0605] The pharmaceutical composition of Molecule 001 described in Example 3 was used in this Example for in vivo studies in animals. Animal studies were used to study the effects of co-administering sirolimus and Molecule 001. The studies showed that administration of sirolimus prolonged the serum exposure of Molecule 001, increased B-cell depletion, and decreased the levels of anti-Molecule 001 antibodies.

[0606] BALB/c mice were treated with Molecule 001 and sirolimus as follows. The mice in treatment groups 1 to 5 all received 0.25 mg/kg Molecule 001 on Study Days 3, 5, 7, 10, 12, 14, 24, 26, 28, 31, 33, and 35. The mice in groups 2-5 received sirolimus in addition to Molecule 001 while the mice in Group 1 received a vehicle only control for sirolimus. The mice in group 2 orally received 0.1 mg of sirolimus on each Study Day from Day 1 to 14. The mice in group 3 orally received 0.3 mg sirolimus on Day 1 and also orally received 0.1 mg of sirolimus on each Study Day from Day 2 to 14. The mice in group 4 orally received 0.3 mg sirolimus on Day 1 and also orally received 0.1 mg sirolimus on each day from Day 2 to 7. The mice in group 5 orally received 0.3 mg sirolimus on Day 1 and Day 22 and also orally received 0.1 mg sirolimus on each day from Day 2 to 14 and from Day 23 to 35. The levels of anti-Molecule 001 antibodies were measured in the serum of the mice in all treatment groups using an ELISA assay, and certain results are reported in Table 13 and FIG. 13. In FIG. 13, treatment group 1 data is shown in blue circles, group 2 is shown in red squares, group 3 is shown in green triangles pointing up, group 4 is shown in purple triangles pointing down, and group 5 is shown in orange diamonds.

TABLE 13
Anti-Molecule 001 IgG Levels as a Percentage of Vehicle-Only Control

| Treatment | Study Day | Study Day | Study Day | Study Day |
|---|---|---|---|---|
| group | 17 | 24 | 31 | 38 |
| #1 | 100% | 100% | 100% | 100% |
| #2 | 0% | 2% | 135% | 78% |
| #3 | 0% | 3% | 23% | 22% |
| #4 | 15% | 43% | 166% | 93% |
| #5 | 2% | 7% | 11% | 37% |

[0607] This mouse study showed that anti-Molecule 001 antibody levels were often reduced during cycle 1 (e.g. at Day 17 or Day 24) and cycle 2 (e.g. at Day 38) when sirolimus was administered (loading and maintenance) during the first cycle of Molecule 001 administration (see FIG. 13).

[0608] Non-human primate studies revealed that anti-Molecule 001 antibody levels were reduced at Days 10 and 17. Cynomolgus monkeys were intravenously administered Molecule 001 at doses between 40 to 80 μg/kg on Days 3, 5, 6, 10, 12, 14, 24, 26, 28, 31, 33, and 35, and sirolimus was orally administered at 3 mg/kg on Day 1 and at 1 mg/kg on Days 2-14. Peripheral B-cell levels were monitored during the study. Anti-Molecule 001 antibody levels were analyzed starting on Day 10. In non-human primates, coadministration of sirolimus with Molecule 001 reduced anti-Molecule 001 antibody levels and allows for longer serum exposure and prolonged B-cell depletion.

[0609] A study using cynomolgus macaques was conducted to investigate effects of the combination of Molecule 001 and sirolimus. Two groups were used with all the animals in both groups intravenously receiving 0.075 mg/kg of Molecule 001 on Study Days 3, 5, 7, 10, 12, 14, 24, 26, 28, 31, 33, and 35. The cynomolgus macaques in the treatment group orally received 3 mg/kg of sirolimus on Study Day 1 and 1 mg/kg of sirolimus on each of Study Days from Day 2 to Day 14. The animals in the other group only received Molecule 001. The levels of anti-Molecule 001 antibodies in the serum of the macaques were measured using an MSD bridging assay, and certain results are reported in FIG. 14-15. The population levels of peripheral B-cells (e.g. high CD20 expressing cells and low CD20 expressing cells) were measured along with certain aspects of pharmacokinetics (FIGS. 16-17).

[0610] FIG. 14 shows the anti-Molecule 001 antibody titer level plotted on Day 10 or Day 17 for the two primate treatment groups. FIG. 17 shows the percentage of high or low CD20 expressing B-cells relative to pretest values plotted by day of study for the two primate treatment groups.

[0611] This non-human primate study showed that coadministration of sirolimus with Molecule 001 may significantly reduce anti-Molecule 001 IgG responses after three or six doses of Molecule 001 (see e.g. FIGS. 14-15). The pharmacokinetic study showed that serum levels of Molecule 001 observed on Day 14 were often higher in primates co-administered sirolimus (see e.g. FIG. 16). Sirolimus treated primates demonstrated extended peripheral B-cell level depletion (nadir on Day 17 versus Day 10) and greater decreases (−93% vs −79%) in B-cells compared to Group 1 (see e.g. FIG. 17).

### Example 5: Combination of Molecule 001 with Chemotherapy Results in Synergistic Cytotoxicity In Vitro

[0612] Molecule 001 was tested in combination with chemotherapy drugs in vitro. Specifically, cells from various immortalized cancer lines were incubated at 37° C. in a 5% CO₂ atmosphere with Molecule 001, a chemotherapeutic agent, or a combination of the two. Cell viability was measured after a three day incubation. Results are shown in FIG. 18A-18B and summarized in Table 14 below.

TABLE 14
In vitro responses to Molecule 001 in combination with chemotherapy

| | Chemotherapy | | | | |
|---|---|---|---|---|---|
| | Doxorubicin | Vincristine | Gemcitabine | Bendamustine | |
| Cell line | (Dox) | (Vin) | (Gem) | (Ben) | Cisplatin (Cis) |
| Raji | Synergistic | Synergistic | Synergistic | Not Reported | Synergistic |
| SU-DHL- | Predominantly | Predominantly | Predominantly | Synergistic | Mixed |
| 4 | Synergistic | Synergistic | Synergistic | | |
| Daudi | Mixed | Predominantly | Predominantly | Synergistic | Mixed |
| | | Synergistic | Synergistic | | |
| HBL-1 | Synergistic | Predominantly | Predominantly | Synergistic | Predominantly |
| | | Synergistic | Synergistic | | Synergistic |

[0613] The cytotoxicity of Molecule 001 in combination with lenalidomide was also tested in vitro, in lymphoma (Daudi) cells. The cells were incubated with LEN or vehicle for 21 (FIG. 19A) or 48 hours (FIG. 19B). Following this, Molecule 001 was added and viability was measured after an additional 3 days, using the Promega® Cell Titer-Gb® assay (FIG. 19C). FIG. 19D is an isobologram depicting the synergistic toxicity of Molecule 001 on Daudi cells pre-treated with lenalidomide for 24 hours.

[0614] The cytotoxicity of Molecule 001 in combination with lenalidomide was also tested in Burkitt's lymphoma (ST-486) cells. The cells were incubated with Molecule 001 only, lenalidomide only, or a combination of Molecule 001 and lenalidomide. Cell viability was measured 72 hours after treatment using the Promega® Cell TiterGlo® assay (FIG. 19E). The concentrations of lenalidomide used in this assay had little effect on cell viability and had no effect on the activity of Molecule 001.

[0615] The cytotoxicity of Molecule 001 in combination with gemcitabine was also tested in CD20-positive (SU-DHL-4, Daudi, Raji, HBL-1, and Toledo) and CD20-negative (L-82 and MV-4-11) cell lines. The cells were incubated with gemcitabine alone or in combination with different concentrations of Molecule 001. Cell viability was measured 72 hours after treatment using the Promega® Cell Titer-Gb® assay (FIG. 22A and FIG. 22B).

[0616] Taken together, these data show that the combination of Molecule 001 and chemotherapy demonstrate synergistic cellular cytotoxicity, and that the combination of Molecule 001 and LEN demonstrate significantly greater potency against lymphoma cells than either agent alone.

### Example 6. A Phase 2a Open-Label Study of Molecule 001 in Combination with Lenalidomide (LEN) in Subjects with Relapsed or Refractory B-Cell Non-Hodgkin Lymphoma (NHL)

[0617] Molecule 001 is being tested in a phase 2a study in combination with LEN in adult patients with histologically confirmed, relapsed or refractory CD20+B-cell NHL. The primary objective of the study is to determine safety and tolerability, including the maximum tolerated dose (MTD), of Molecule 001 in combination with LEN. Secondary objectives include determining pharmacokinetics (PK), pharmacodynamics (PD), immunogenicity, and tumor response.

[0618] Key inclusion criteria for the study include:

[0619] 1) Subjects must have received at least one approved therapy for NHL and have measurable disease by Lugano Criteria. Specifically, subjects should have bi-dimensionally measurable disease by Lugano Classification for NHL (>1.5 cm LDi for lymph noted; >1.0 cm LDi for extra nodal disease).

[0620] 2) Subjects who have progressed following CAR T-cell therapy, autologous or allogeneic stem cell transplant are eligible. Subjects who underwent stem cell transplant (SCT)>100 days for autologous SCT or >180 days for allogeneic SCT before study drug administration and exhibited a full hematological recovery prior to relapse are eligible.

[0621] 3) Serum rituximab level must be negative (<500 ng/mL) at screening, because rituximab competes with Molecule 001 for binding to CD20.

[0622] 4) Adequate bone marrow function (ANC≥1,000/mm³, platelet count ≥50,000/mm^{3′} hemoglobin ≥8 g/dL), adequate hepatic function (total bilirubin ≤1.5×ULN, AST≤3×ULN, ALT≤3×ULN); adequate coagulation (INR or PT≤1.5×ULN, PTT≤1.5 ULN); adequate serum albumin ≥3.0 g/dL). Subjects must also have adequate kidney function (creatinine clearance (CLcr) to be ≥50 mL/min either measured or assessed by using the Cockcroft-Gault formula).

[0623] Key exclusion criteria for the study include:

[0624] 1) Subjects which have received anti-CD20 monoclonal antibody therapy within the following periods before the start of treatment: Rituximab: 84 days; if a subject had received rituximab within 37 weeks before the start of treatment, then a serum rituximab level must be negative (<500 ng/mL) at screening; 2) Obinutuzumab: 184 days; 3) Ofatumumab: 88 days.

[0625] Other exclusion criteria include:

[0626] 2) Current evidence of acute or chronic graft-versus-host disease.

[0627] 3) History or current evidence of neoplastic disease that is histologically distinct from NHL, except cervical carcinoma in situ, superficial noninvasive bladder tumors, curatively treated Stage I-II non-melanoma skin cancer. Subjects with prior, curatively treated cancer >2 years ago before the start of treatment can be enrolled.

[0628] 4) Current evidence of new or growing brain or spinal metastases during screening. However, subjects with known brain or spinal metastases may be eligible under some circumstances.

[0629] 5) Current evidence of Common Terminology Criteria for Adverse Events (CTCAE) Grade >1 toxicity (before the start of treatment, except for hair loss, and those Grade 2 toxicities listed as permitted in other eligibility criteria).

[0630] 6) Current evidence of incomplete recovery from surgery or radiotherapy before the start of treatment, or planned surgery or radiotherapy at any time during the study until the EoT Visit, except minor elective interventions deemed acceptable by the investigator.

[0631] 7) Current evidence of significant (CTCAE Grade ≥2) infection or wound within 4 weeks before the start of treatment. Subjects with Grade 2 infection that has stabilized or improved with oral anti-infectives before the start of treatment may be eligible at the sponsor's discretion

[0632] 8) Current evidence of significant cardiovascular disease including, but not limited to the following conditions:

[0633] a. Unstable angina (symptoms of angina at rest) or new-onset angina within ≤3 months before the start of treatment.

[0634] b. Arterial thrombosis or pulmonary embolism within ≤3 months before the start of treatment.

[0635] c. Myocardial infarction or stroke within ≤3 months before the start of treatment.

[0636] d. Pericarditis (any CTCAE grade), pericardial effusion (CTCAE Grade ≥2), non malignant pleural effusion (CTCAE Grade ≥2) or malignant pleural effusion (CTCAE Grade ≥3).

[0637] e. Congestive heart failure New York Heart Association (NYHA) Class III or IV at screening or left ventricular ejection fraction (LVEF)<45%, assessed by Echo or multiple-gated acquisition (MUGA) scan within 1 month before starting study treatment. Echo or MUGA scan performed within 6 months before screening and at least 28 days after the last cancer therapy is acceptable provided the subject has not received any potential cardiotoxic agents since then.

[0638] f. Cardiac arrhythmia requiring anti-arrhythmic therapy at Screening. Subjects receiving digoxin, calcium channel blockers, or beta-adrenergic blockers are eligible at the investigator's discretion after consultation with medical monitor if the dose has been stable for ≥2 weeks before the start of treatment with Molecule 001. Subjects with sinus arrhythmia and infrequent premature ventricular contractions are eligible at the investigator's discretion.

[0639] 9) QT interval corrected according to Fridericia's formula (QTcF)>480 ms, determined as the average from three QTcF values on the triplicate electrocardiogram (ECG) obtained at Screening.

[0640] 10) Current evidence of uncontrolled HIV, HBV or HCV at screening. Serology testing is not required if seronegativity is documented in the medical history and if there are no clinical signs suggestive of HIV or hepatitis infections, or suspected exposure. The following exceptions apply for subjects with positive viral serology:

[0641] a. Subjects with HIV and an undetectable viral load and CD4+ T-cells counts ≥350 cells/microliter may be enrolled, but must be taking appropriate opportunistic infection prophylaxis, if clinically relevant.

[0642] b. Subjects with positive HBV serology are eligible if they have an undetectable viral load and the subject will receive antiviral prophylaxis for potential HBV reactivation-per institutional guidelines.

[0643] c. Subjects with positive HCV serology are eligible if quantitative PCR for plasma HCV RNA is below the lower limit of detection. Concurrent antiviral HCV treatment per institutional guidelines is allowed.

[0644] 11) Women who are pregnant or breastfeeding.

[0645] 12) History or current evidence of hypersensitivity to any of the study drugs, or of current hypersensitivity requiring systemic steroids at doses >20 mg/day prednisone equivalent.

[0646] 13) History or current evidence of any other medical or psychiatric condition or addictive disorder, or laboratory abnormality that, in the opinion of the investigator, may increase the risks associated with study participation, or require treatments that may interfere with the conduct of the study or the interpretation of study results.

[0647] 14) Prior treatment with Molecule 001.

[0648] 15) Received therapy for NHL (except the anti-CD20 Mab therapies listed above and radioimmunoconjugates) within 4 weeks before the start of treatment.

[0649] 16) Any investigational drug treatment from 4 weeks or 5 half-lives of the agent before the start of treatment, whichever is longer, until the EoT Visit.

[0650] 17) Received radiotherapy to tumor lesions that would be chosen as target lesions (measurable disease) within 4 weeks before the start of treatment, unless the lesion exhibited objective progression between the radiotherapy and the screening according to the Lugano Classification for NHL. Palliative radiotherapy to non-target lesions may be permitted at the investigator's discretion after consultation with the medical monitor.

[0651] 18) Received any live vaccines within 4 weeks before of the start of treatment, unless the investigator believes the benefits outweigh the risks, after approval with the sponsor.

[0652] 19) Require use of systemic immune modulators during study treatment. Systemic immune modulators include but are not limited to systemic corticosteroids at doses >20 mg/day or prednisone equivalent, cyclosporine and tacrolimus.

[0653] A study design schema is shown in FIG. 20. The study is being conducted in 2 parts. Part 1 includes Molecule 001 dose escalation over 5 dose cohorts according to a modified 3+3 design and will include up to 24 subjects with CD20+ NHL. The MTD for Molecule 001 will be defined as the highest dose of Molecule 001 that can be given in combination with LEN so that no more than 1 of 6 subjects experiences a dose-limiting toxicity (DLT) in Part 1 of this study. At least 6 subjects must be treated at the MTD dose level of Molecule 001 in combination with LEN and complete Cycle 1, or experience a DLT. All subtypes of B-cell NHL may be considered for Part 1. Only histologically confirmed documented DLBCL (including mixed histology) may be considered for Part 1.

[0654] Part 2 is designed to assess the safety and tolerability of Molecule 001 plus LEN in the MTD Expansion Cohort, where the dose declared as MTD of Molecule 001 in part 1 will be given in combination with LEN in up to 40 subjects with CD20+ relapsed or refractory diffuse large B-cell lymphoma. In addition, the PK, PD, immunogenicity and tumor response of Molecule 001 plust LEN will be evaluated in Part 2.

[0655] In the first two dose cohorts (10 and 25 μg/kg/dose of Part 1, subjects received Molecule 001 IV infusions over 1 hour three times weekly for 2 weeks (days 1, 3, 5, 8, 10, and 12), and LEN (20 mg daily) on days 1-21 of each 28-day treatment cycle for Cycles 1 and 2. In subsequent cycles, Molecule 001 was administered once weekly (days 1, 8, 15, and 22) with continued LEN dosing on Days 1-21.

[0656] The analysis included 6 subjects (Cohort 1 & 2, both n=3), diagnosed as follows: follicular lymphoma (n=3), mantle cell lymphoma, small lymphocytic lymphoma & DLBCL (each n=1). Median age was 64.5 y (range, 52-69); subjects received a median of 2 (1-6) prior lines of therapy. All subjects had ≥1 treatment-emergent adverse event (TEAE) & 44 TEAEs occurred (Cohort 1, n=12; Cohort 2, n=32); the most common were peripheral edema, fatigue & myalgia (both n=3), hypoalbuminemia, hypokalemia, muscular weakness (each n=2), all grade (G) 1-2 except 2 G3 (fatigue, hypokalemia). Six treatment-related AEs occurred in Cohort 1, 20 in Cohort 2; no deaths occurred. One subject in Cohort 2 experienced 3 treatment-related serious AEs that led to hospitalization: G4 neutropenia, G3 anemia & G2 capillary leak syndrome (CLS). Two dose-limiting toxicities (DLTs) occurred in 2 subjects treated in Cohort 2 (both G2 CLS). Four subjects were radiologically assessed (Cohort 1, n=3; Cohort 2, n=1). In Cohort 1, the best responses were 1 complete response (CR, 1 prior treatment), 1 partial response & 1 stable disease. In Cohort 2, 1 subject (3 prior treatments) had a CR. This data is summarized in FIG. 21.

[0657] Because of 2 dose-limiting toxicities (grade 2 capillary leak syndrome) in Cohort 2, the dose in Cohort 23 was reduced from 50 to 20 μg/kg/dose. The protocol was amended so that in future Cohorts 4 and 5 (20 and 50 μg/kg/dose), Molecule 001 will be dosed biweekly for 2 weeks for Cycles 1 and 2 and then once weekly for subsequent cycles. The administered dose of Molecule 001 will be capped at 6000 μg/dose.

### Example 7. A Phase 2a Open-Label Study of Molecule 001 in Combination with Gemcitabine and Oxaliplatin (GemOx) in Subjects with Relapsed or Refractory B-Cell Non-Hodgkin Lymphoma (NHL)

[0658] Molecule 001 is also being tested in a phase 2a study in combination with GemOx in adult patients with histologically confirmed, relapsed or refractory CD20+B-cell NHL. The primary objectives are to determine the safety and tolerability, including the maximum tolerated dose (MTD), of Molecule 001+GemOx. Secondary objectives include determining pharmacokinetics (PK), pharmacodynamics (PD), immunogenicity and tumor response.

[0659] The study is being conducted in two parts. Part 1 includes Molecule 001 dose escalation according to a modified 3+3 design to identify the MTD of Molecule 001+GemOx and will enroll up to 24 subjects. Part 2 will confirm the safety and tolerability of Molecule 001+GemOx in the MTD Expansion Cohort and will enroll up to 40 subjects.

[0660] Eligible subjects will have histologically confirmed, relapsed or refractory CD20+B-cell NHL (in Part 2, r/rDLBCL only). Subjects must have received at least one approved therapy for NHL and must have measurable disease by Lugano criteria. Subjects who have progressed following CAR T-cell therapy, autologous- or allogeneic stem cell transplant will be also eligible. Serum rituximab level must be below lower limits of quantification (<500 ng/mL) at screening.

[0661] The study is being conducted in two sequential parts (Part 1 and Part 2). Part 1 includes a modified 3+3 design to determine the MTD of Molecule 001 in combination with gemcitabine (1000 mg/m²) and oxaliplatin (100 mg/m²) in up to 24 subjects with relapsed or refractory B-Cell NHL. If permitted by the safety results, Molecule 001 dose escalation will proceed in three sequential dose cohorts (Cohorts 1 to 3). The starting dose of Molecule 001 will be 10 μg/kg/dose in Cohort 1, 25 μg/kg/dose in Cohort 2, and 50 μg/kg/dose in Cohort 3. The maximum dose of Molecule 001 given in this study is 50 μg/kg/dose with a maximum total dose of 6000 μg. Molecule 001 dose escalation will not proceed above the 50 μg/kg/dose even if no more than 1 of 6 subjects experiences a dose-limiting toxicity (DLT).

[0662] In Part 2, the MTD dose cohort will be expanded to confirm the safety and tolerability of Molecule 001 in combination with GemOx in up to 40 additional subjects with DLBCL. The PK, PD, and immunogenicity and tumor responses of Molecule 001 in combination with GemOx will be more thoroughly evaluated in Part 2.

[0663] Molecule 001 was administered to subjects on Days 1, 3, 5, 8, 10 and 12 within 28-day cycles during Cycles 1 and 2 while GemOx (Gemcitabine 1000 mg/m², and Oxaliplatin 100 mg/m²) was administered on Days 2 and 16 during Cycles 1 and 2. During Cycles 3 and beyond, Molecule 001 was to be administered weekly (Days 1, 8, 15, and 21 of a 28-day cycle) with the same dosing of GemOx on Day 2 and 16. Subjects could receive up to 5 treatment cycles in the absence of clear disease progression or toxicity.

[0664] Subjects in Cohort 1 were dosed at 10 μg/kg/dose of Molecule 001 in combination with GemOx (Gemcitabine 1000 mg/m², and Oxaliplatin 100 mg/m²) according to the dosing regimen described above. FIG. 23 shows the minimum observed percent change of CD19+ cells from baseline upon treatment with Molecule 001 and GemOx.

[0665] The best overall response was one complete response in a subject with DLBCL, one partial response in a subject with activated B cell DLBCL, one partial response in a subject with germinal center B cell DLBCL, one partial response in a subject with follicular lymphoma, one partial response in a subject with mixed DLBCL and follicular lymphoma, and one partial response in a subject with DLBCL.

[0666] All seven subjects in Cohort 1 experienced at least one adverse event (AE) and 3 subjects reported at least one serious adverse event (SAE). Five subjects experienced treatment-related AEs. The most frequent AEs occurring in 3 or more subjects were nausea, peripheral sensory neuropathy, dysgeusia, fatigue, decreased neutrophil count, oedema peripheral, anaemia, increased aspartate aminotransferase, constipation, cough, decreased appetite, diarrhea, hyponatremia, hypotension, and decreased platelet count. Two subjects experienced a treatment-related SAE of Grade 2 capillary leak syndrome (CLS) early in Cycle 1 of treatment. No treatment-related deaths occurred in Cohort 1.

[0667] Because of the dose-limiting toxicities in Cohort 1 (Grade 2 CLS), Cycle 1 was amended to a 42-day cycle and all subsequent cycles will be 28 days. In Cycle 1, Molecule 001 will be administered on Day 1, 3, 5, 8, 10, 12 and then weekly on Days 15, 22, 29, and 36 while GemOx will be administered on Days 16 and 30. For subsequent 28-day cycles, Molecule 001 will be administered on Day 1, 8, 15, and 22 while GemOx will be administered on Days 2 and 16. Subjects may receive up to 4 treatment cycles in the absence of clear disease progression or toxicity and additional 28-day cycles may be considered for subjects who experience clinical benefit. The administered dose of Molecule 001 will be capped at 6000 μg/dose.

[0668] While some embodiments described herein have been described by way of illustration, it will be apparent that the invention may be put into practice with many modifications, variations and adaptations, and with the use of numerous equivalents or alternative solutions that are within the scope of persons skilled in the art, without departing from the spirit described herein or exceeding the scope of the claims.

[0669] All publications, patents, and patent applications are herein incorporated by reference in their entirety to the same extent as if each individual publication, patent or patent application was specifically and individually indicated to be incorporated by reference in its entirety. The patent application publications WO 2005/092917, WO 2007/033497, US 2013/196928, WO 2014/164680, WO 2014/164693, WO 2015/113005, WO 2015/113007, WO 2015/138435, WO 2015/138452, US 2015/0259428, WO 2015/191764, US 2016/0126950 and US 2016/0177284 are each incorporated herein by reference in its entirety. The disclosures of U.S. provisional patent applications 61/777,130, 62/112,314, and 62/249,193 are each incorporated herein by reference in its entirety. The complete disclosures of all electronically available biological sequence information from GenBank (National Center for Biotechnology Information, U.S.) for amino acid and nucleotide sequences cited herein are each incorporated herein by reference in its entirety.

What is claimed is:

1. A method for treating or slowing the progression of a non-Hodgkin's lymphoma;
wherein the method comprises administering to a subject in need thereof:
(i) an effective amount of a CD20-binding molecule; and
(ii) an effective amount of lenalidomide;
wherein the CD20-binding molecule comprises a polypeptide having the sequence of SEQ ID NO: 54.

2. The method of claim 1, wherein the CD20-binding molecule is administered at a dose of about 10 μg/kg, about 20 μg/kg, about 25 μg/kg, about 50 μg/kg, or about 75 μg/kg of the subject's body weight

3. The method of claim 2, wherein the CD20-binding molecule is administered on each of days 1, 3, 5, 8, 10, and 12 of a first 28-day cycle.

4. The method of claim 3, wherein lenalidomide is administered daily on days 1 to 21 of the first 28-day cycle.

5. The method of claim 3, further comprising administering the CD20-binding molecule weekly during a second 28-day cycle following the first 28-day cycle, wherein the CD20-binding molecule is administered on days 1, 8, 15, and 22 of the second 28-day cycle.

6. The method of claim 5, wherein each dose administered during the second 28-day cycle is in an amount of about 10 μg/kg, about 25 μg/kg, about 50 μg/kg, or about 75 μg/kg of the subject's body weight.

7. The method of claim 5, wherein the lenalidomide is administered daily on days 1 to 21 of the second 28-day cycle.

8. The method of claim 5, further comprising administering the CD20-binding molecule weekly during a third 28-day cycle following the first and second 28-day cycles, wherein the CD20-binding molecule is administered on days 1, 8, 15, and 22 of the third 28-day cycle.

9. The method of claim 8, wherein each dose administered during the third 28-day cycle is in an amount of about 10 μg/kg, about 25 μg/kg, about 50 μg/kg, or about 75 μg/kg of the subject's body weight.

10. The method of claim 8, wherein the lenalidomide is administered daily on days 1 to 21 of the third 28-day cycle.

11. The method of claim 8, further comprising administering the CD20-binding molecule for at least one additional 28-day cycle.

12. The method of claim 11, wherein each dose of the CD20-binding molecule administered during the at least one additional 28-day cycle is in an amount of about 10 μg/kg, about 25 μg/kg, about 50 μg/kg, or about 75 μg/kg of the subject's body weight.

13. The method of claim 11, wherein the lenalidomide is administered daily on days 1 to 21 of the at least one additional 28-day cycle.

14. The method of claim 1, wherein the CD20-binding molecule is administered by intravenous infusion.

15. The method of claim 14, wherein the intravenous infusion is administered over about 1 hour.

16. The method of claim 1, wherein the lenalidomide is administered orally.

17. The method of claim 16, wherein the lenalidomide is administered at a dose of about 20 milligram per day.

18. The method of claim 1, wherein the non-Hodgkin's lymphoma is diffuse large B-cell lymphoma, mantle cell lymphoma, or follicular lymphoma.

19. The method of claim 18, wherein the non-Hodgkin's lymphoma is relapsed or refractory to treatment with at least one additional anti-cancer therapy.

20. The method of claim 1, wherein the CD20-binding molecule is a homodimer comprising two identical polypeptides; wherein each identical polypeptide has the amino acid sequence of SEQ ID NO: 54.

21. The method of claim 1, wherein the CD20-binding molecule is provided in a pharmaceutical composition, and wherein the pharmaceutical composition comprises at least one pharmaceutically acceptable excipient or carrier.

22. The method of claim 21, wherein the pharmaceutical composition comprises sorbitol, sodium citrate and polysorbate-20.

23. The method of claim 1, wherein the amount of the CD20-binding molecule administered in a single dose is about 0.5 mg to about 10 mg.

24. The method of claim 1, wherein the amount of the CD20-binding molecule administered over one or more cycles is about 5 mg to about 250 mg.

The application's sequence listing, which the Patent Office published only in electronic form, follows.

SEQUENCE LISTING (391 sequences)

SEQ ID NO: 1 - protein, 293 aa, Escherichia coli
KEFTLDFSTAKTYVDSLNVIRSAIGTPLQTISSGGTSLLMIDSGSGDNLFAVDVRGIDPEEGRFNNLRLIVERNNLYVTGFVNRTNNVFYRFADFSHVTFPGTTAVTLSGDSSYTTLQRVAGISRTGMQINRHSLTTSYLDLMSHSGTSLTQSVARAMLRFVTVTAEALRFRQIQRGFRTTLDDLSGRSYVMTAEDVDLTLNWGRLSSVLPDYHGQDSVRVGRISFGSINAILGSVALILNCHHHASRVARMASDEFPSMCPADGRVRGITHNKILWDSSTLGAILMRRTISS

SEQ ID NO: 2 - protein, 293 aa, Shigella dysenteriae
KEFTLDFSTAKTYVDSLNVIRSAIGTPLQTISSGGTSLLMIDSGTGDNLFAVDVRGIDPEEGRFNNLRLIVERNNLYVTGFVNRTNNVFYRFADFSHVTFPGTTAVTLSGDSSYTTLQRVAGISRTGMQINRHSLTTSYLDLMSHSGTSLTQSVARAMLRFVTVTAEALRFRQIQRGFRTTLDDLSGRSYVMTAEDVDLTLNWGRLSSVLPDYHGQDSVRVGRISFGSINAILGSVALILNCHHHASRVARMASDEFPSMCPADGRVRGITHNKILWDSSTLGAILMRRTISS

SEQ ID NO: 3 - protein, 297 aa, Escherichia coli
DEFTVDFSSQKSYVDSLNSIRSAISTPLGNISQGGVSVSVINHVLGGNYISLNVRGLDPYSERFNHLRLIMERNNLYVAGFINTETNIFYRFSDFSHISVPDVITVSMTTDSSYSSLQRIADLERTGMQIGRHSLVGSYLDLMEFRGRSMTRASSRAMLRFVTVIAEALRFRQIQRGFRPALSEASPLYTMTAQDVDLTLNWGRISNVLPEYRGEEGVRIGRISFNSLSAILGSVAVILNCHSTGSYSVRSVSQKQKTECQIVGDRAAIKVNNVLWEANTIAALLNRKPQDLTEPNQ

SEQ ID NO: 4 - protein, 251 aa, Escherichia coli
KEFTLDFSTAKTYVDSLNVIRSAIGTPLQTISSGGTSLLMIDSGSGDNLFAVDVRGIDPEEGRFNNLRLIVERNNLYVTGFVNRTNNVFYRFADFSHVTFPGTTAVTLSGDSSYTTLQRVAGISRTGMQINRHSLTTSYLDLMSHSGTSLTQSVARAMLRFVTVTAEALRFRQIQRGFRTTLDDLSGRSYVMTAEDVDLTLNWGRLSSVLPDYHGQDSVRVGRISFGSINAILGSVALILNCHHHASRVAR

SEQ ID NO: 5 - protein, 10 aa, Artificial Sequence
  Synthetic peptide
GYTFTSYNMH

SEQ ID NO: 6 - protein, 17 aa, Artificial Sequence
  Synthetic peptide
AIYPGNGDTSYNQKFKG

SEQ ID NO: 7 - protein, 12 aa, Artificial Sequence
  Synthetic peptide
AQLRPNYWYFDV

SEQ ID NO: 8 - protein, 10 aa, Artificial Sequence
  Synthetic peptide
RASSSVSYMH

SEQ ID NO: 9 - protein, 7 aa, Artificial Sequence
  Synthetic peptide
ATSNLAS

SEQ ID NO: 10 - protein, 9 aa, Artificial Sequence
  Synthetic peptide
QQWISNPPT

SEQ ID NO: 11 - protein, 10 aa, Artificial Sequence
  Synthetic peptide
GYTFTSYNVH

SEQ ID NO: 12 - protein, 17 aa, Artificial Sequence
  Synthetic peptide
AIYPGNGDTSFNQKFKG

SEQ ID NO: 13 - protein, 14 aa, Artificial Sequence
  Synthetic peptide
SNYYGSSYVWFFDV

SEQ ID NO: 14 - protein, 10 aa, Artificial Sequence
  Synthetic peptide
RASSSVSYMD

SEQ ID NO: 15 - protein, 7 aa, Artificial Sequence
  Synthetic peptide
ATSNLAS

SEQ ID NO: 16 - protein, 9 aa, Artificial Sequence
  Synthetic peptide
QQWISNPPT

SEQ ID NO: 17 - protein, 10 aa, Artificial Sequence
  Synthetic peptide
GYTFTSYNMH

SEQ ID NO: 18 - protein, 17 aa, Artificial Sequence
  Synthetic peptide
AIYPGNGDTSYNQKFKG

SEQ ID NO: 19 - protein, 12 aa, Artificial Sequence
  Synthetic peptide
STYYGGDWYFNV

SEQ ID NO: 20 - protein, 10 aa, Artificial Sequence
  Synthetic peptide
RASSSVSYIH

SEQ ID NO: 21 - protein, 7 aa, Artificial Sequence
  Synthetic peptide
ATSNLAS

SEQ ID NO: 22 - protein, 9 aa, Artificial Sequence
  Synthetic peptide
QQWTSNPPT

SEQ ID NO: 23 - protein, 10 aa, Artificial Sequence
  Synthetic peptide
GFTFNDYAMH

SEQ ID NO: 24 - protein, 17 aa, Artificial Sequence
  Synthetic peptide
TISWNSGSIGYADSVKG

SEQ ID NO: 25 - protein, 13 aa, Artificial Sequence
  Synthetic peptide
DIQYGNYYYGMDV

SEQ ID NO: 26 - protein, 11 aa, Artificial Sequence
  Synthetic peptide
RASQSVSSYLA

SEQ ID NO: 27 - protein, 7 aa, Artificial Sequence
  Synthetic peptide
DASNRAT

SEQ ID NO: 28 - protein, 9 aa, Artificial Sequence
  Synthetic peptide
QQRSNWPIT

SEQ ID NO: 29 - protein, 10 aa, Artificial Sequence
  Synthetic peptide
GYTFTSYNMH

SEQ ID NO: 30 - protein, 17 aa, Artificial Sequence
  Synthetic peptide
AIYPGNGDTSYNQKFKG

SEQ ID NO: 31 - protein, 13 aa, Artificial Sequence
  Synthetic peptide
VVYYSNSYWYFDV

SEQ ID NO: 32 - protein, 10 aa, Artificial Sequence
  Synthetic peptide
RASSSVSYMH

SEQ ID NO: 33 - protein, 7 aa, Artificial Sequence
  Synthetic peptide
APSNLAS

SEQ ID NO: 34 - protein, 9 aa, Artificial Sequence
  Synthetic peptide
QQWSFNPPT

SEQ ID NO: 35 - protein, 10 aa, Artificial Sequence
  Synthetic peptide
GYAFSYSWIN

SEQ ID NO: 36 - protein, 17 aa, Artificial Sequence
  Synthetic peptide
RIFPGDGDTDYNGKFKG

SEQ ID NO: 37 - protein, 10 aa, Artificial Sequence
  Synthetic peptide
NVFDGYWLVY

SEQ ID NO: 38 - protein, 16 aa, Artificial Sequence
  Synthetic peptide
RSSKSLLHSNGITYLY

SEQ ID NO: 39 - protein, 7 aa, Artificial Sequence
  Synthetic peptide
QMSNLVS

SEQ ID NO: 40 - protein, 9 aa, Artificial Sequence
  Synthetic peptide
AQNLELPYT

SEQ ID NO: 41 - protein, 16 aa, Artificial Sequence
  Synthetic peptide
EFPKPSTPPGSSGGAP

SEQ ID NO: 42 - protein, 7 aa, Artificial Sequence
  Synthetic peptide
GGGGSGG

SEQ ID NO: 43 - protein, 25 aa, Artificial Sequence
  Synthetic peptide
GGGGSGGGGSGGGGSGGGGSGGGGS

SEQ ID NO: 44 - protein, 15 aa, Artificial Sequence
  Synthetic peptide
GSTSGSGKPGSGEGS

SEQ ID NO: 45 - protein, 5 aa, Artificial Sequence
  Synthetic peptide
GGGGS

SEQ ID NO: 46 - protein, 9 aa, Artificial Sequence
  Synthetic peptide
GILGFVFTL

SEQ ID NO: 47 - protein, 523 aa, Artificial Sequence
  Synthetic polypeptide
  MISC_FEATURE (510)..(510): Cys residue at this position is available to form a homodimer or heterodimer via a disulfide bond with any of SEQ ID NOS 47-175
QVQLVQSGAELVKPGASVKMSCKASGYTFTSYNMHWVKQTPGQGLEWIGAIYPGNGDTSYNQKFKGKATLTADKSSSTAYMQLSSLTSEDSAVYYCARAQLRPNYWYFDVWGAGTTVTVSSGGGGSGGGGSGGGGSGGGGSGGGGSDIVLSQSPAILSASPGEKVTMTCRASSSVSYMHWYQQKPGSSPKPWIYATSNLASGVPARFSGSGSGTSYSLTISRVEAEDAATYYCQQWISNPPTFGAGTKLELKEFPKPSTPPGSSGGAPKEFTLDFSTAKTYVDSLNVIRSAIGTPLQTISSGGTSLLMIDSGSGDNLFAVDVRGIDPEEGRFNNLRLIVERNNLYVTGFVNRTNNVFYRFADFSHVTFPGTTAVTLSGDSSYTTLQRVAGISRTGMQINRHSLTTSYLDLMSHSGTSLTQSVARAMLRFVTVTAEALRFRQIQRGFRTTLDDLSGRSYVMTAEDVDLTLNWGRLSSVLPDYHGQDSVRVGRISFGSINAILGSVALILNCHHHASRVARKDEL

SEQ ID NO: 48 - protein, 509 aa, Artificial Sequence
  Synthetic polypeptide
  MISC_FEATURE (500)..(500): Cys residue at this position is available to form a homodimer or heterodimer via a disulfide bond with any of SEQ ID NOS 47-175
QVQLVQSGAELVKPGASVKMSCKASGYTFTSYNMHWVKQTPGQGLEWIGAIYPGNGDTSYNQKFKGKATLTADKSSSTAYMQLSSLTSEDSAVYYCARAQLRPNYWYFDVWGAGTTVTVSSGSTSGSGKPGSGEGSDIVLSQSPAILSASPGEKVTMTCRASSSVSYMHWYQQKPGSSPKPWIYATSNLASGVPARFSGSGSGTSYSLTISRVEAEDAATYYCQQWISNPPTFGAGTKLELKEFPKPSTPPGSSGGAPKEFTLDFSTAKTYVDSLNVIRSAIGTPLQTISSGGTSLLMIDSGSGDNLFAVDVRGIDPEEGRFNNLRLIVERNNLYVTGFVNRTNNVFYRFADFSHVTFPGTTAVTLSGDSSYTTLQRVAGISRTGMQINRHSLTTSYLDLMSHSGTSLTQSVARAMLRFVTVTAEALRFRQIQRGFRTTLDDLSGRSYVMTAEDVDLTLNWGRLSSVLPDYHGQDSVRVGRISFGSINAILGSVALILNCHHHASRVAR

SEQ ID NO: 49 - protein, 499 aa, Artificial Sequence
  Synthetic polypeptide
  MISC_FEATURE (490)..(490): Cys residue at this position is available to form a homodimer or heterodimer via a disulfide bond with any of SEQ ID NOS 47-175
QVQLVQSGAELVKPGASVKMSCKASGYTFTSYNMHWVKQTPGQGLEWIGAIYPGNGDTSYNQKFKGKATLTADKSSSTAYMQLSSLTSEDSAVYYCARAQLRPNYWYFDVWGAGTTVTVSSGGGGSDIVLSQSPAILSASPGEKVTMTCRASSSVSYMHWYQQKPGSSPKPWIYATSNLASGVPARFSGSGSGTSYSLTISRVEAEDAATYYCQQWISNPPTFGAGTKLELKEFPKPSTPPGSSGGAPKEFTLDFSTAKTYVDSLNVIRSAIGTPLQTISSGGTSLLMIDSGTGDNLFAVDVRGIAPEEGRFNNLRLIVERNNLYVTGFVNRTNNVFYRFADFSHVTFPGTTAVTLSADSSYTTLQRVAGISRTGMQINRHSLTTSYLDLMSHSATSLTQSVARAMLRFVTVTAEALRFRQIQRGFRTTLDDLSGASYVMTAEDVDLTLNWGRLSSVLPDYHGQDSVRVGRISFGSINAILGSVALILNCHHHASRVAR

SEQ ID NO: 50 - protein, 510 aa, Artificial Sequence
  Synthetic polypeptide
  MISC_FEATURE (501)..(501): Cys residue at this position is available to form a homodimer or heterodimer via a disulfide bond with any of SEQ ID NOS 47-175
QVQLVQSGAELVKPGASVKMSCKASGYTFTSYNMHWVKQTPGQGLEWIGAIYPGNGDTSYNQKFKGKATLTADKSSSTAYMQLSSLTSEDSAVYYCARAQLRPNYWYFDVWGAGTTVTVSSGGGGSGGGGSGGGGSGGGGSGGGGSDIVLSQSPAILSASPGEKVTMTCRASSSVSYMHWYQQKPGSSPKPWIYATSNLASGVPARFSGSGSGTSYSLTISRVEAEDAATYYCQQWISNPPTFGAGTKLELKGGGGSGGKEFTLDFSTAKTYVDSLNVIRSAIGTPLQTISSGGTSLLMIDSGSGDNLFAVDVRGIAPEEGRFNNLRLIVERNNLYVTGFVNRTNNVFYRFADFSHVTFPGTTAVTLSADSSYTTLQRVAGISRTGMQINRHSLTTSYLDLMSHSATSLTQSVARAMLRFVTVTAEALRFRQIQRGFRTTLDDLSGASYVMTAEDVDLTLNWGRLSSVLPDYHGQDSVRVGRISFGSINAILGSVALILNCHHHASRVAR

SEQ ID NO: 51 - protein, 500 aa, Artificial Sequence
  Synthetic polypeptide
  MISC_FEATURE (491)..(491): Cys residue at this position is available to form a homodimer or heterodimer via a disulfide bond with any of SEQ ID NOS 47-175
QVQLVQSGAELVKPGASVKMSCKASGYTFTSYNMHWVKQTPGQGLEWIGAIYPGNGDTSYNQKFKGKATLTADKSSSTAYMQLSSLTSEDSAVYYCARAQLRPNYWYFDVWGAGTTVTVSSGSTSGSGKPGSGEGSDIVLSQSPAILSASPGEKVTMTCRASSSVSYMHWYQQKPGSSPKPWIYATSNLASGVPARFSGSGSGTSYSLTISRVEAEDAATYYCQQWISNPPTFGAGTKLELKGGGGSGGKEFTLDFSTAKTYVDSLNVIRSAIGTPLQTISSGGTSLLMIDNLVPMVATVVDVRGIDPEEGRFNNLRLIVERNNLYVTGFVNRTNNVFYRFADFSHVTFPGTTAVTLSGDSSYTTLQRVAGISRTGMQINRHSLTTSYLDLMSHSGTSLTQSVARAMLRFVTVTAEALRFRQIQRGFRTTLDDLSGRSYVMTAEDVDLTLNWGRLSSVLPDYHGQDSVRVGRISFGSINAILGSVALILNCHHHASRVAR

SEQ ID NO: 52 - protein, 508 aa, Artificial Sequence
  Synthetic polypeptide
  MISC_FEATURE (499)..(499): Cys residue at this position is available to form a homodimer or heterodimer via a disulfide bond with any of SEQ ID NOS 47-175
QVQLVQSGAELVKPGASVKMSCKASGYTFTSYNMHWVKQTPGQGLEWIGAIYPGNGDTSYNQKFKGKATLTADKSSSTAYMQLSSLTSEDSAVYYCARAQLRPNYWYFDVWGAGTTVTVSSGGGGSDIVLSQSPAILSASPGEKVTMTCRASSSVSYMHWYQQKPGSSPKPWIYATSNLASGVPARFSGSGSGTSYSLTISRVEAEDAATYYCQQWISNPPTFGAGTKLELKEFPKPSTPPGSSGGAPGILGFVFTLKEFTLDFSTAKTYVDSLNVIRSAIGTPLQTISSGGTSLLMIDSGSGDNLFAVDVRGIDPEEGRFNNLRLIVERNNLYVTGFVNRTNNVFYRFADFSHVTFPGTTAVTLSGDSSYTTLQRVAGISRTGMQINRHSLTTSYLDLMSHSGTSLTQSVARAMLRFVTVTAEALRFRQIQRGFRTTLDDLSGRSYVMTAEDVDLTLNWGRLSSVLPDYHGQDSVRVGRISFGSINAILGSVALILNCHHHASAVAA

SEQ ID NO: 53 - protein, 521 aa, Artificial Sequence
  Synthetic polypeptide
  MISC_FEATURE (512)..(512): Cys residue at this position is available to form a homodimer or heterodimer via a disulfide bond with any of SEQ ID NOS 47-175
QVQLQQPGAELVKPGASVKMSCKTSGYTFTSYNVHWVKQTPGQGLEWIGAIYPGNGDTSFNQKFKGKATLTADKSSSTVYMQLSSLTSEDSAVYYCARSNYYGSSYVWFFDVWGAGTTVTVSSGGGGSGGGGSGGGGSGGGGSGGGGSQIVLSQSPTILSASPGEKVTMTCRASSSVSYMDWYQQKPGSSPKPWIYATSNLASGVPARFSGSGSGTSYSLTISRVEAEDAATYYCQQWISNPPTFGAGTKLELKEFPKPSTPPGSSGGAPKEFTLDFSTAKTYVDSLNVIRSAIGTPLQTISSGGTSLLMIDSGSGDNLFAVDVRGIDPEEGRFNNLRLIVERNNLYVTGFVNRTNNVFYRFADFSHVTFPGTTAVTLSGDSSYTTLQRVAGISRTGMQINRHSLTTSYLDLMSHSGTSLTQSVARAMLRFVTVTAEALRFRQIQRGFRTTLDDLSGRSYVMTAEDVDLTLNWGRLSSVLPDYHGQDSVRVGRISFGSINAILGSVALILNCHHHASRVAR

SEQ ID NO: 54 - protein, 512 aa, Artificial Sequence
  Synthetic polypeptide
  MISC_FEATURE (503)..(503): Cys residue at this position is available to form a homodimer or heterodimer via a disulfide bond with any of SEQ ID NOS 47-175
MQVQLQQPGAELVKPGASVKMSCKTSGYTFTSYNVHWVKQTPGQGLEWIGAIYPGNGDTSFNQKFKGKATLTADKSSSTVYMQLSSLTSEDSAVYYCARSNYYGSSYVWFFDVWGAGTTVTVSSGSTSGSGKPGSGEGSQIVLSQSPTILSASPGEKVTMTCRASSSVSYMDWYQQKPGSSPKPWIYATSNLASGVPARFSGSGSGTSYSLTISRVEAEDAATYYCQQWISNPPTFGAGTKLELKEFPKPSTPPGSSGGAPKEFTLDFSTAKTYVDSLNVIRSAIGTPLQTISSGGTSLLMIDSGSGDNLFAVDVRGIDPEEGRFNNLRLIVERNNLYVTGFVNRTNNVFYRFADFSHVTFPGTTAVTLSGDSSYTTLQRVAGISRTGMQINRHSLTTSYLDLMSHSGTSLTQSVARAMLRFVTVTAEALRFRQIQRGFRTTLDDLSGRSYVMTAEDVDLTLNWGRLSSVLPDYHGQDSVRVGRISFGSINAILGSVALILNCHHHASRVAR

SEQ ID NO: 55 - protein, 511 aa, Artificial Sequence
  Synthetic polypeptide
  MISC_FEATURE (502)..(502): Cys residue at this position is available to form a homodimer or heterodimer via a disulfide bond with any of SEQ ID NOS 47-175
QVQLQQPGAELVKPGASVKMSCKTSGYTFTSYNVHWVKQTPGQGLEWIGAIYPGNGDTSFNQKFKGKATLTADKSSSTVYMQLSSLTSEDSAVYYCARSNYYGSSYVWFFDVWGAGTTVTVSSGSTSGSGKPGSGEGSQIVLSQSPTILSASPGEKVTMTCRASSSVSYMDWYQQKPGSSPKPWIYATSNLASGVPARFSGSGSGTSYSLTISRVEAEDAATYYCQQWISNPPTFGAGTKLELKEFPKPSTPPGSSGGAPKEFTLDFSTAKTYVDSLNVIRSAIGTPLQTISSGGTSLLMIDSGSGDNLFAVDVRGIDPEEGRFNNLRLIVERNNLYVTGFVNRTNNVFYRFADFSHVTFPGTTAVTLSGDSSYTTLQRVAGISRTGMQINRHSLTTSYLDLMSHSGTSLTQSVARAMLRFVTVTAEALRFRQIQRGFRTTLDDLSGRSYVMTAEDVDLTLNWGRLSSVLPDYHGQDSVRVGRISFGSINAILGSVALILNCHHHASRVAR

SEQ ID NO: 56 - protein, 501 aa, Artificial Sequence
  Synthetic polypeptide
  MISC_FEATURE (492)..(492): Cys residue at this position is available to form a homodimer or heterodimer via a disulfide bond with any of SEQ ID NOS 47-175
QVQLQQPGAELVKPGASVKMSCKTSGYTFTSYNVHWVKQTPGQGLEWIGAIYPGNGDTSFNQKFKGKATLTADKSSSTVYMQLSSLTSEDSAVYYCARSNYYGSSYVWFFDVWGAGTTVTVSSGGGGSQIVLSQSPTILSASPGEKVTMTCRASSSVSYMDWYQQKPGSSPKPWIYATSNLASGVPARFSGSGSGTSYSLTISRVEAEDAATYYCQQWISNPPTFGAGTKLELKEFPKPSTPPGSSGGAPKEFTLDFSTAKTYVDSLNVIRSAIGTPLQTISSGGTSLLMIDSGSGDNLFAVDVRGIDPEEGRFNNLRLIVERNNLYVTGFVNRTNNVFYRFADFSHVTFPGTTAVTLSGDSSYTTLQRVAGISRTGMQINRHSLTTSYLDLMSHSGTSLTQSVARAMLRFVTVTAEALRFRQIQRGFRTTLDDLSGRSYVMTAEDVDLTLNWGRLSSVLPDYHGQDSVRVGRISFGSINAILGSVALILNCHHHASRVAR

SEQ ID NO: 57 - protein, 512 aa, Artificial Sequence
  Synthetic polypeptide
  MISC_FEATURE (503)..(503): Cys residue at this position is available to form a homodimer or heterodimer via a disulfide bond with any of SEQ ID NOS 47-175
QVQLQQPGAELVKPGASVKMSCKTSGYTFTSYNVHWVKQTPGQGLEWIGAIYPGNGDTSFNQKFKGKATLTADKSSSTVYMQLSSLTSEDSAVYYCARSNYYGSSYVWFFDVWGAGTTVTVSSGGGGSGGGGSGGGGSGGGGSGGGGSQIVLSQSPTILSASPGEKVTMTCRASSSVSYMDWYQQKPGSSPKPWIYATSNLASGVPARFSGSGSGTSYSLTISRVEAEDAATYYCQQWISNPPTFGAGTKLELKGGGGSGGKEFTLDFSTAKTYVDSLNVIRSAIGTPLQTISSGGTSLLMIDSGSGDNLFAVDVRGIDPEEGRFNNLRLIVERNNLYVTGFVNRTNNVFYRFADFSHVTFPGTTAVTLSGDSSYTTLQRVAGISRTGMQINRHSLTTSYLDLMSHSGTSLTQSVARAMLRFVTVTAEALRFRQIQRGFRTTLDDLSGRSYVMTAEDVDLTLNWGRLSSVLPDYHGQDSVRVGRISFGSINAILGSVALILNCHHHASRVAR

SEQ ID NO: 58 - protein, 502 aa, Artificial Sequence
  Synthetic polypeptide
  MISC_FEATURE (493)..(493): Cys residue at this position is available to form a homodimer or heterodimer via a disulfide bond with any of SEQ ID NOS 47-175
QVQLQQPGAELVKPGASVKMSCKTSGYTFTSYNVHWVKQTPGQGLEWIGAIYPGNGDTSFNQKFKGKATLTADKSSSTVYMQLSSLTSEDSAVYYCARSNYYGSSYVWFFDVWGAGTTVTVSSGSTSGSGKPGSGEGSQIVLSQSPTILSASPGEKVTMTCRASSSVSYMDWYQQKPGSSPKPWIYATSNLASGVPARFSGSGSGTSYSLTISRVEAEDAATYYCQQWISNPPTFGAGTKLELKGGGGSGGKEFTLDFSTAKTYVDSLNVIRSAIGTPLQTISSGGTSLLMIDSGSGDNLFAVDVRGIDPEEGRFNNLRLIVERNNLYVTGFVNRTNNVFYRFADFSHVTFPGTTAVTLSGDSSYTTLQRVAGISRTGMQINRHSLTTSYLDLMSHSGTSLTQSVARAMLRFVTVTAEALRFRQIQRGFRTTLDDLSGRSYVMTAEDVDLTLNWGRLSSVLPDYHGQDSVRVGRISFGSINAILGSVALILNCHHHASRVAR

SEQ ID NO: 59 - protein, 530 aa, Artificial Sequence
  Synthetic polypeptide
  MISC_FEATURE (521)..(521): Cys residue at this position is available to form a homodimer or heterodimer via a disulfide bond with any of SEQ ID NOS 47-175
QVQLQQPGAELVKPGASVKMSCKTSGYTFTSYNVHWVKQTPGQGLEWIGAIYPGNGDTSFNQKFKGKATLTADKSSSTVYMQLSSLTSEDSAVYYCARSNYYGSSYVWFFDVWGAGTTVTVSSGGGGSGGGGSGGGGSGGGGSGGGGSQIVLSQSPTILSASPGEKVTMTCRASSSVSYMDWYQQKPGSSPKPWIYATSNLASGVPARFSGSGSGTSYSLTISRVEAEDAATYYCQQWISNPPTFGAGTKLELKEFPKPSTPPGSSGGAPGILGFVFTLKEFTLDFSTAKTYVDSLNVIRSAIGTPLQTISSGGTSLLMIDSGSGDNLFAVDVRGIDPEEGRFNNLRLIVERNNLYVTGFVNRTNNVFYRFADFSHVTFPGTTAVTLSGDSSYTTLQRVAGISRTGMQINRHSLTTSYLDLMSHSGTSLTQSVARAMLRFVTVTAEALRFRQIQRGFRTTLDDLSGRSYVMTAEDVDLTLNWGRLSSVLPDYHGQDSVRVGRISFGSINAILGSVALILNCHHHASRVAR

SEQ ID NO: 60 - protein, 520 aa, Artificial Sequence
  Synthetic polypeptide
  MISC_FEATURE (511)..(511): Cys residue at this position is available to form a homodimer or heterodimer via a disulfide bond with any of SEQ ID NOS 47-175
QVQLQQPGAELVKPGASVKMSCKTSGYTFTSYNVHWVKQTPGQGLEWIGAIYPGNGDTSFNQKFKGKATLTADKSSSTVYMQLSSLTSEDSAVYYCARSNYYGSSYVWFFDVWGAGTTVTVSSGSTSGSGKPGSGEGSQIVLSQSPTILSASPGEKVTMTCRASSSVSYMDWYQQKPGSSPKPWIYATSNLASGVPARFSGSGSGTSYSLTISRVEAEDAATYYCQQWISNPPTFGAGTKLELKEFPKPSTPPGSSGGAPGILGFVFTLKEFTLDFSTAKTYVDSLNVIRSAIGTPLQTISSGGTSLLMIDSGSGDNLFAVDVRGIDPEEGRFNNLRLIVERNNLYVTGFVNRTNNVFYRFADFSHVTFPGTTAVTLSGDSSYTTLQRVAGISRTGMQINRHSLTTSYLDLMSHSGTSLTQSVARAMLRFVTVTAEALRFRQIQRGFRTTLDDLSGRSYVMTAEDVDLTLNWGRLSSVLPDYHGQDSVRVGRISFGSINAILGSVALILNCHHHASRVAR

SEQ ID NO: 61 - protein, 510 aa, Artificial Sequence
  Synthetic polypeptide
  MISC_FEATURE (501)..(501): Cys residue at this position is available to form a homodimer or heterodimer via a disulfide bond with any of SEQ ID NOS 47-175
QVQLQQPGAELVKPGASVKMSCKTSGYTFTSYNVHWVKQTPGQGLEWIGAIYPGNGDTSFNQKFKGKATLTADKSSSTVYMQLSSLTSEDSAVYYCARSNYYGSSYVWFFDVWGAGTTVTVSSGGGGSQIVLSQSPTILSASPGEKVTMTCRASSSVSYMDWYQQKPGSSPKPWIYATSNLASGVPARFSGSGSGTSYSLTISRVEAEDAATYYCQQWISNPPTFGAGTKLELKEFPKPSTPPGSSGGAPGILGFVFTLKEFTLDFSTAKTYVDSLNVIRSAIGTPLQTISSGGTSLLMIDSGSGDNLFAVDVRGIDPEEGRFNNLRLIVERNNLYVTGFVNRTNNVFYRFADFSHVTFPGTTAVTLSGDSSYTTLQRVAGISRTGMQINRHSLTTSYLDLMSHSGTSLTQSVARAMLRFVTVTAEALRFRQIQRGFRTTLDDLSGRSYVMTAEDVDLTLNWGRLSSVLPDYHGQDSVRVGRISFGSINAILGSVALILNCHHHASRVAR

SEQ ID NO: 62 - protein, 492 aa, Artificial Sequence
  Synthetic polypeptide
  MISC_FEATURE (483)..(483): Cys residue at this position is available to form a homodimer or heterodimer via a disulfide bond with any of SEQ ID NOS 47-175
QVQLQQPGAELVKPGASVKMSCKTSGYTFTSYNVHWVKQTPGQGLEWIGAIYPGNGDTSFNQKFKGKATLTADKSSSTVYMQLSSLTSEDSAVYYCARSNYYGSSYVWFFDVWGAGTTVTVSSGGGGSQIVLSQSPTILSASPGEKVTMTCRASSSVSYMDWYQQKPGSSPKPWIYATSNLASGVPARFSGSGSGTSYSLTISRVEAEDAATYYCQQWISNPPTFGAGTKLELKGGGGSGGKEFTLDFSTAKTYVDSLNVIRSAIGTPLQTISSGGTSLLMIDSGTGDNLFAVDVRGIDPEEGRFNNLRLIVERNNLYVTGFVNRTNNVFYRFADFSHVTFPGTTAVTLSGDSSYTTLQRVAGISRTGMQINRHSLTTSYLDLMSHSGTSLTQSVARAMLRFVTVTAEALRFRQIQRGFRTTLDDLSGRSYVMTAEDVDLTLNWGRLSSVLPDYHGQDSVRVGRISFGSINAILGSVALILNCHHHASRVAR

SEQ ID NO: 63 - protein, 517 aa, Artificial Sequence
  Synthetic polypeptide
  MISC_FEATURE (512)..(512): Cys residue at this position is available to form a homodimer or heterodimer via a disulfide bond with any of SEQ ID NOS 47-175
QVQLQQPGAELVKPGASVKMSCKTSGYTFTSYNVHWVKQTPGQGLEWIGAIYPGNGDTSFNQKFKGKATLTADKSSSTVYMQLSSLTSEDSAVYYCARSNYYGSSYVWFFDVWGAGTTVTVSSGGGGSGGGGSGGGGSGGGGSGGGGSQIVLSQSPTILSASPGEKVTMTCRASSSVSYMDWYQQKPGSSPKPWIYATSNLASGVPARFSGSGSGTSYSLTISRVEAEDAATYYCQQWISNPPTFGAGTKLELKEFPKPSTPPGSSGGAPKEFTLDFSTAKTYVDSLNVIRSAIGTPLQTISSGGTSLLMIDSGSGDNLFAVDVRGIAPEEGRFNNLRLIVERNNLYVTGFVNRTNNVFYRFADFSHVTFPGTTAVTLSADSSYTTLQRVAGISRTGMQINRHSLTTSYLDLMSHSATSLTQSVARAMLRFVTVTAEALRFRQIQRGFRTTLDDLSGASYVMTAEDVDLTLNWGRLSSVLPDYHGQDSVRVGRISFGSINAILGSVALILNCHHHAS

SEQ ID NO: 64 - protein, 511 aa, Artificial Sequence
  Synthetic polypeptide
  MISC_FEATURE (502)..(502): Cys residue at this position is available to form a homodimer or heterodimer via a disulfide bond with any of SEQ ID NOS 47-175
QVQLQQPGAELVKPGASVKMSCKTSGYTFTSYNVHWVKQTPGQGLEWIGAIYPGNGDTSFNQKFKGKATLTADKSSSTVYMQLSSLTSEDSAVYYCARSNYYGSSYVWFFDVWGAGTTVTVSSGSTSGSGKPGSGEGSQIVLSQSPTILSASPGEKVTMTCRASSSVSYMDWYQQKPGSSPKPWIYATSNLASGVPARFSGSGSGTSYSLTISRVEAEDAATYYCQQWISNPPTFGAGTKLELKEFPKPSTPPGSSGGAPKEFTLDFSTAKTYVDSLNVIRSAIGTPLQTISSGGTSLLMIDNLVPMVATVVDVRGIDPEEGRFNNLRLIVERNNLYVTGFVNRTNNVFYRFADFSHVTFPGTTAVTLSGDSSYTTLQRVAGISRTGMQINRHSLTTSYLDLMSHSGTSLTQSVARAMLRFVTVTAEALRFRQIQRGFRTTLDDLSGRSYVMTAEDVDLTLNWGRLSSVLPDYHGQDSVRVGRISFGSINAILGSVALILNCHHHASRVAR

SEQ ID NO: 65 - protein, 526 aa, Artificial Sequence
  Synthetic polypeptide
  MISC_FEATURE (521)..(521): Cys residue at this position is available to form a homodimer or heterodimer via a disulfide bond with any of SEQ ID NOS 47-175
QVQLQQPGAELVKPGASVKMSCKTSGYTFTSYNVHWVKQTPGQGLEWIGAIYPGNGDTSFNQKFKGKATLTADKSSSTVYMQLSSLTSEDSAVYYCARSNYYGSSYVWFFDVWGAGTTVTVSSGGGGSGGGGSGGGGSGGGGSGGGGSQIVLSQSPTILSASPGEKVTMTCRASSSVSYMDWYQQKPGSSPKPWIYATSNLASGVPARFSGSGSGTSYSLTISRVEAEDAATYYCQQWISNPPTFGAGTKLELKEFPKPSTPPGSSGGAPGILGFVFTLKEFTLDFSTAKTYVDSLNVIRSAIGTPLQTISSGGTSLLMIDSGSGDNLFAVDVRGIDPEEGRFNNLRLIVERNNLYVTGFVNRTNNVFYRFADFSHVTFPGTTAVTLSGDSSYTTLQRVAGISRTGMQINRHSLTTSYLDLMSHSGTSLTQSVARAMLRFVTVTAEALRFRQIQRGFRTTLDDLSGRSYVMTAEDVDLTLNWGRLSSVLPDYHGQDSVRVGRISFGSINAILGSVALILNCHHHAS

SEQ ID NO: 66 - protein, 525 aa, Artificial Sequence
  Synthetic polypeptide
  MISC_FEATURE (512)..(512): Cys residue at this position is available to form a homodimer or heterodimer via a disulfide bond with any of SEQ ID NOS 47-175
QVQLQQPGAELVKPGASVKMSCKTSGYTFTSYNVHWVKQTPGQGLEWIGAIYPGNGDTSFNQKFKGKATLTADKSSSTVYMQLSSLTSEDSAVYYCARSNYYGSSYVWFFDVWGAGTTVTVSSGGGGSGGGGSGGGGSGGGGSGGGGSQIVLSQSPTILSASPGEKVTMTCRASSSVSYMDWYQQKPGSSPKPWIYATSNLASGVPARFSGSGSGTSYSLTISRVEAEDAATYYCQQWISNPPTFGAGTKLELKEFPKPSTPPGSSGGAPKEFTLDFSTAKTYVDSLNVIRSAIGTPLQTISSGGTSLLMIDSGSGDNLFAVDVRGIDPEEGRFNNLRLIVERNNLYVTGFVNRTNNVFYRFADFSHVTFPGTTAVTLSGDSSYTTLQRVAGISRTGMQINRHSLTTSYLDLMSHSGTSLTQSVARAMLRFVTVTAEALRFRQIQRGFRTTLDDLSGRSYVMTAEDVDLTLNWGRLSSVLPDYHGQDSVRVGRISFGSINAILGSVALILNCHHHASRVARKDEL

SEQ ID NO: 67 - protein, 515 aa, Artificial Sequence
  Synthetic polypeptide
  MISC_FEATURE (502)..(502): Cys residue at this position is available to form a homodimer or heterodimer via a disulfide bond with any of SEQ ID NOS 47-175
QVQLQQPGAELVKPGASVKMSCKTSGYTFTSYNVHWVKQTPGQGLEWIGAIYPGNGDTSFNQKFKGKATLTADKSSSTVYMQLSSLTSEDSAVYYCARSNYYGSSYVWFFDVWGAGTTVTVSSGSTSGSGKPGSGEGSQIVLSQSPTILSASPGEKVTMTCRASSSVSYMDWYQQKPGSSPKPWIYATSNLASGVPARFSGSGSGTSYSLTISRVEAEDAATYYCQQWISNPPTFGAGTKLELKEFPKPSTPPGSSGGAPKEFTLDFSTAKTYVDSLNVIRSAIGTPLQTISSGGTSLLMIDSGSGDNLFAVDVRGIDPEEGRFNNLRLIVERNNLYVTGFVNRTNNVFYRFADFSHVTFPGTTAVTLSGDSSYTTLQRVAGISRTGMQINRHSLTTSYLDLMSHSGTSLTQSVARAMLRFVTVTAEALRFRQIQRGFRTTLDDLSGRSYVMTAEDVDLTLNWGRLSSVLPDYHGQDSVRVGRISFGSINAILGSVALILNCHHHASRVARKDEL

SEQ ID NO: 68 - protein, 505 aa, Artificial Sequence
  Synthetic polypeptide
  MISC_FEATURE (492)..(492): Cys residue at this position is available to form a homodimer or heterodimer via a disulfide bond with any of SEQ ID NOS 47-175
QVQLQQPGAELVKPGASVKMSCKTSGYTFTSYNVHWVKQTPGQGLEWIGAIYPGNGDTSFNQKFKGKATLTADKSSSTVYMQLSSLTSEDSAVYYCARSNYYGSSYVWFFDVWGAGTTVTVSSGGGGSQIVLSQSPTILSASPGEKVTMTCRASSSVSYMDWYQQKPGSSPKPWIYATSNLASGVPARFSGSGSGTSYSLTISRVEAEDAATYYCQQWISNPPTFGAGTKLELKEFPKPSTPPGSSGGAPKEFTLDFSTAKTYVDSLNVIRSAIGTPLQTISSGGTSLLMIDSGSGDNLFAVDVRGIDPEEGRFNNLRLIVERNNLYVTGFVNRTNNVFYRFADFSHVTFPGTTAVTLSGDSSYTTLQRVAGISRTGMQINRHSLTTSYLDLMSHSGTSLTQSVARAMLRFVTVTAEALRFRQIQRGFRTTLDDLSGRSYVMTAEDVDLTLNWGRLSSVLPDYHGQDSVRVGRISFGSINAILGSVALILNCHHHASRVARKDEL

SEQ ID NO: 69 - protein, 516 aa, Artificial Sequence
  Synthetic polypeptide
  MISC_FEATURE (503)..(503): Cys residue at this position is available to form a homodimer or heterodimer via a disulfide bond with any of SEQ ID NOS 47-175
QVQLQQPGAELVKPGASVKMSCKTSGYTFTSYNVHWVKQTPGQGLEWIGAIYPGNGDTSFNQKFKGKATLTADKSSSTVYMQLSSLTSEDSAVYYCARSNYYGSSYVWFFDVWGAGTTVTVSSGGGGSGGGGSGGGGSGGGGSGGGGSQIVLSQSPTILSASPGEKVTMTCRASSSVSYMDWYQQKPGSSPKPWIYATSNLASGVPARFSGSGSGTSYSLTISRVEAEDAATYYCQQWISNPPTFGAGTKLELKGGGGSGGKEFTLDFSTAKTYVDSLNVIRSAIGTPLQTISSGGTSLLMIDSGSGDNLFAVDVRGIDPEEGRFNNLRLIVERNNLYVTGFVNRTNNVFYRFADFSHVTFPGTTAVTLSGDSSYTTLQRVAGISRTGMQINRHSLTTSYLDLMSHSGTSLTQSVARAMLRFVTVTAEALRFRQIQRGFRTTLDDLSGRSYVMTAEDVDLTLNWGRLSSVLPDYHGQDSVRVGRISFGSINAILGSVALILNCHHHASRVARKDEL

SEQ ID NO: 70 - protein, 506 aa, Artificial Sequence
  Synthetic polypeptide
  MISC_FEATURE (493)..(493): Cys residue at this position is available to form a homodimer or heterodimer via a disulfide bond with any of SEQ ID NOS 47-175
QVQLQQPGAELVKPGASVKMSCKTSGYTFTSYNVHWVKQTPGQGLEWIGAIYPGNGDTSFNQKFKGKATLTADKSSSTVYMQLSSLTSEDSAVYYCARSNYYGSSYVWFFDVWGAGTTVTVSSGSTSGSGKPGSGEGSQIVLSQSPTILSASPGEKVTMTCRASSSVSYMDWYQQKPGSSPKPWIYATSNLASGVPARFSGSGSGTSYSLTISRVEAEDAATYYCQQWISNPPTFGAGTKLELKGGGGSGGKEFTLDFSTAKTYVDSLNVIRSAIGTPLQTISSGGTSLLMIDSGSGDNLFAVDVRGIDPEEGRFNNLRLIVERNNLYVTGFVNRTNNVFYRFADFSHVTFPGTTAVTLSGDSSYTTLQRVAGISRTGMQINRHSLTTSYLDLMSHSGTSLTQSVARAMLRFVTVTAEALRFRQIQRGFRTTLDDLSGRSYVMTAEDVDLTLNWGRLSSVLPDYHGQDSVRVGRISFGSINAILGSVALILNCHHHASRVARKDEL

SEQ ID NO: 71 - protein, 534 aa, Artificial Sequence
  Synthetic polypeptide
  MISC_FEATURE (521)..(521): Cys residue at this position is available to form a homodimer or heterodimer via a disulfide bond with any of SEQ ID NOS 47-175
QVQLQQPGAELVKPGASVKMSCKTSGYTFTSYNVHWVKQTPGQGLEWIGAIYPGNGDTSFNQKFKGKATLTADKSSSTVYMQLSSLTSEDSAVYYCARSNYYGSSYVWFFDVWGAGTTVTVSSGGGGSGGGGSGGGGSGGGGSGGGGSQIVLSQSPTILSASPGEKVTMTCRASSSVSYMDWYQQKPGSSPKPWIYATSNLASGVPARFSGSGSGTSYSLTISRVEAEDAATYYCQQWISNPPTFGAGTKLELKEFPKPSTPPGSSGGAPGILGFVFTLKEFTLDFSTAKTYVDSLNVIRSAIGTPLQTISSGGTSLLMIDSGSGDNLFAVDVRGIDPEEGRFNNLRLIVERNNLYVTGFVNRTNNVFYRFADFSHVTFPGTTAVTLSGDSSYTTLQRVAGISRTGMQINRHSLTTSYLDLMSHSGTSLTQSVARAMLRFVTVTAEALRFRQIQRGFRTTLDDLSGRSYVMTAEDVDLTLNWGRLSSVLPDYHGQDSVRVGRISFGSINAILGSVALILNCHHHASRVARKDEL

SEQ ID NO: 72 - protein, 524 aa, Artificial Sequence
  Synthetic polypeptide
  MISC_FEATURE (511)..(511): Cys residue at this position is available to form a homodimer or heterodimer via a disulfide bond with any of SEQ ID NOS 47-175
QVQLQQPGAELVKPGASVKMSCKTSGYTFTSYNVHWVKQTPGQGLEWIGAIYPGNGDTSFNQKFKGKATLTADKSSSTVYMQLSSLTSEDSAVYYCARSNYYGSSYVWFFDVWGAGTTVTVSSGSTSGSGKPGSGEGSQIVLSQSPTILSASPGEKVTMTCRASSSVSYMDWYQQKPGSSPKPWIYATSNLASGVPARFSGSGSGTSYSLTISRVEAEDAATYYCQQWISNPPTFGAGTKLELKEFPKPSTPPGSSGGAPGILGFVFTLKEFTLDFSTAKTYVDSLNVIRSAIGTPLQTISSGGTSLLMIDSGSGDNLFAVDVRGIDPEEGRFNNLRLIVERNNLYVTGFVNRTNNVFYRFADFSHVTFPGTTAVTLSGDSSYTTLQRVAGISRTGMQINRHSLTTSYLDLMSHSGTSLTQSVARAMLRFVTVTAEALRFRQIQRGFRTTLDDLSGRSYVMTAEDVDLTLNWGRLSSVLPDYHGQDSVRVGRISFGSINAILGSVALILNCHHHASRVARKDEL

SEQ ID NO: 73 - protein, 514 aa, Artificial Sequence
  Synthetic polypeptide
  MISC_FEATURE (501)..(501): Cys residue at this position is available to form a homodimer or heterodimer via a disulfide bond with any of SEQ ID NOS 47-175
QVQLQQPGAELVKPGASVKMSCKTSGYTFTSYNVHWVKQTPGQGLEWIGAIYPGNGDTSFNQKFKGKATLTADKSSSTVYMQLSSLTSEDSAVYYCARSNYYGSSYVWFFDVWGAGTTVTVSSGGGGSQIVLSQSPTILSASPGEKVTMTCRASSSVSYMDWYQQKPGSSPKPWIYATSNLASGVPARFSGSGSGTSYSLTISRVEAEDAATYYCQQWISNPPTFGAGTKLELKEFPKPSTPPGSSGGAPGILGFVFTLKEFTLDFSTAKTYVDSLNVIRSAIGTPLQTISSGGTSLLMIDSGSGDNLFAVDVRGIDPEEGRFNNLRLIVERNNLYVTGFVNRTNNVFYRFADFSHVTFPGTTAVTLSGDSSYTTLQRVAGISRTGMQINRHSLTTSYLDLMSHSGTSLTQSVARAMLRFVTVTAEALRFRQIQRGFRTTLDDLSGRSYVMTAEDVDLTLNWGRLSSVLPDYHGQDSVRVGRISFGSINAILGSVALILNCHHHASRVARKDEL

SEQ ID NO: 74 - protein, 496 aa, Artificial Sequence
  Synthetic polypeptide
  MISC_FEATURE (483)..(483): Cys residue at this position is available to form a homodimer or heterodimer via a disulfide bond with any of SEQ ID NOS 47-175
QVQLQQPGAELVKPGASVKMSCKTSGYTFTSYNVHWVKQTPGQGLEWIGAIYPGNGDTSFNQKFKGKATLTADKSSSTVYMQLSSLTSEDSAVYYCARSNYYGSSYVWFFDVWGAGTTVTVSSGGGGSQIVLSQSPTILSASPGEKVTMTCRASSSVSYMDWYQQKPGSSPKPWIYATSNLASGVPARFSGSGSGTSYSLTISRVEAEDAATYYCQQWISNPPTFGAGTKLELKGGGGSGGKEFTLDFSTAKTYVDSLNVIRSAIGTPLQTISSGGTSLLMIDSGTGDNLFAVDVRGIDPEEGRFNNLRLIVERNNLYVTGFVNRTNNVFYRFADFSHVTFPGTTAVTLSGDSSYTTLQRVAGISRTGMQINRHSLTTSYLDLMSHSGTSLTQSVARAMLRFVTVTAEALRFRQIQRGFRTTLDDLSGRSYVMTAEDVDLTLNWGRLSSVLPDYHGQDSVRVGRISFGSINAILGSVALILNCHHHASRVARKDEL

SEQ ID NO: 75 - protein, 521 aa, Artificial Sequence
  Synthetic polypeptide
  MISC_FEATURE (512)..(512): Cys residue at this position is available to form a homodimer or heterodimer via a disulfide bond with any of SEQ ID NOS 47-175
QVQLQQPGAELVKPGASVKMSCKTSGYTFTSYNVHWVKQTPGQGLEWIGAIYPGNGDTSFNQKFKGKATLTADKSSSTVYMQLSSLTSEDSAVYYCARSNYYGSSYVWFFDVWGAGTTVTVSSGGGGSGGGGSGGGGSGGGGSGGGGSQIVLSQSPTILSASPGEKVTMTCRASSSVSYMDWYQQKPGSSPKPWIYATSNLASGVPARFSGSGSGTSYSLTISRVEAEDAATYYCQQWISNPPTFGAGTKLELKEFPKPSTPPGSSGGAPKEFTLDFSTAKTYVDSLNVIRSAIGTPLQTISSGGTSLLMIDSGSGDNLFAVDVRGIAPEEGRFNNLRLIVERNNLYVTGFVNRTNNVFYRFADFSHVTFPGTTAVTLSADSSYTTLQRVAGISRTGMQINRHSLTTSYLDLMSHSATSLTQSVARAMLRFVTVTAEALRFRQIQRGFRTTLDDLSGASYVMTAEDVDLTLNWGRLSSVLPDYHGQDSVRVGRISFGSINAILGSVALILNCHHHASKDEL

SEQ ID NO: 76 - protein, 515 aa, Artificial Sequence
  Synthetic polypeptide
  MISC_FEATURE (502)..(502): Cys residue at this position is available to form a homodimer or heterodimer via a disulfide bond with any of SEQ ID NOS 47-175
QVQLQQPGAELVKPGASVKMSCKTSGYTFTSYNVHWVKQTPGQGLEWIGAIYPGNGDTSFNQKFKGKATLTADKSSSTVYMQLSSLTSEDSAVYYCARSNYYGSSYVWFFDVWGAGTTVTVSSGSTSGSGKPGSGEGSQIVLSQSPTILSASPGEKVTMTCRASSSVSYMDWYQQKPGSSPKPWIYATSNLASGVPARFSGSGSGTSYSLTISRVEAEDAATYYCQQWISNPPTFGAGTKLELKEFPKPSTPPGSSGGAPKEFTLDFSTAKTYVDSLNVIRSAIGTPLQTISSGGTSLLMIDNLVPMVATVVDVRGIDPEEGRFNNLRLIVERNNLYVTGFVNRTNNVFYRFADFSHVTFPGTTAVTLSGDSSYTTLQRVAGISRTGMQINRHSLTTSYLDLMSHSGTSLTQSVARAMLRFVTVTAEALRFRQIQRGFRTTLDDLSGRSYVMTAEDVDLTLNWGRLSSVLPDYHGQDSVRVGRISFGSINAILGSVALILNCHHHASRVARKDEL

SEQ ID NO: 77 - protein, 530 aa, Artificial Sequence
  Synthetic polypeptide
  MISC_FEATURE (521)..(521): Cys residue at this position is available to form a homodimer or heterodimer via a disulfide bond with any of SEQ ID NOS 47-175
QVQLQQPGAELVKPGASVKMSCKTSGYTFTSYNVHWVKQTPGQGLEWIGAIYPGNGDTSFNQKFKGKATLTADKSSSTVYMQLSSLTSEDSAVYYCARSNYYGSSYVWFFDVWGAGTTVTVSSGGGGSGGGGSGGGGSGGGGSGGGGSQIVLSQSPTILSASPGEKVTMTCRASSSVSYMDWYQQKPGSSPKPWIYATSNLASGVPARFSGSGSGTSYSLTISRVEAEDAATYYCQQWISNPPTFGAGTKLELKEFPKPSTPPGSSGGAPGILGFVFTLKEFTLDFSTAKTYVDSLNVIRSAIGTPLQTISSGGTSLLMIDSGSGDNLFAVDVRGIDPEEGRFNNLRLIVERNNLYVTGFVNRTNNVFYRFADFSHVTFPGTTAVTLSGDSSYTTLQRVAGISRTGMQINRHSLTTSYLDLMSHSGTSLTQSVARAMLRFVTVTAEALRFRQIQRGFRTTLDDLSGRSYVMTAEDVDLTLNWGRLSSVLPDYHGQDSVRVGRISFGSINAILGSVALILNCHHHASKDEL

SEQ ID NO: 78 - protein, 512 aa, Artificial Sequence
  Synthetic polypeptide
  MISC_FEATURE (503)..(503): Cys residue at this position is available to form a homodimer or heterodimer via a disulfide bond with any of SEQ ID NOS 47-175
QVQLQQPGAELVKPGASVKMSCKASGYTFTSYNMHWVKQTPGRGLEWIGAIYPGNGDTSYNQKFKGKATLTADKSSSTAYMQLSSLTSEDSAVYYCARSTYYGGDWYFNVWGAGTTVTVSAGSTSGSGKPGSGEGSTKGQIVLSQSPAILSASPGEKVTMTCRASSSVSYIHWFQQKPGSSPKPWIYATSNLASGVPVRFSGSGSGTSYSLTISRVEAEDAATYYCQQWTSNPPTFGGGTKLEIKEFPKPSTPPGSSGGAPKEFTLDFSTAKTYVDSLNVIRSAIGTPLQTISSGGTSLLMIDSGSGDNLFAVDVRGIDPEEGRFNNLRLIVERNNLYVTGFVNRTNNVFYRFADFSHVTFPGTTAVTLSGDSSYTTLQRVAGISRTGMQINRHSLTTSYLDLMSHSGTSLTQSVARAMLRFVTVTAEALRFRQIQRGFRTTLDDLSGRSYVMTAEDVDLTLNWGRLSSVLPDYHGQDSVRVGRISFGSINAILGSVALILNCHHHASRVAR

SEQ ID NO: 79 - protein, 497 aa, Artificial Sequence
  Synthetic polypeptide
  MISC_FEATURE (484)..(484): Cys residue at this position is available to form a homodimer or heterodimer via a disulfide bond with any of SEQ ID NOS 47-175
QVQLQQPGAELVKPGASVKMSCKASGYTFTSYNMHWVKQTPGRGLEWIGAIYPGNGDTSYNQKFKGKATLTADKSSSTAYMQLSSLTSEDSAVYYCARSTYYGGDWYFNVWGAGTTVTVSAGGGGSTKGQIVLSQSPAILSASPGEKVTMTCRASSSVSYIHWFQQKPGSSPKPWIYATSNLASGVPVRFSGSGSGTSYSLTISRVEAEDAATYYCQQWTSNPPTFGGGTKLEIKGGGGSGGKEFTLDFSTAKTYVDSLNVIRSAIGTPLQTISSGGTSLLMIDSGSGDNLFAVDVRGIDPEEGRFNNLRLIVERNNLYVTGFVNRTNNVFYRFADFSHVTFPGTTAVTLSGDSSYTTLQRVAGISRTGMQINRHSLTTSYLDLMSHSGTSLTQSVARAMLRFVTVTAEALRFRQIQRGFRTTLDDLSGRSYVMTAEDVDLTLNWGRLSSVLPDYHGQDSVRVGRISFGSINAILGSVALILNCHHHASRVARKDEL

SEQ ID NO: 80 - protein, 522 aa, Artificial Sequence
  Synthetic polypeptide
  MISC_FEATURE (513)..(513): Cys residue at this position is available to form a homodimer or heterodimer via a disulfide bond with any of SEQ ID NOS 47-175
QVQLQQPGAELVKPGASVKMSCKASGYTFTSYNMHWVKQTPGRGLEWIGAIYPGNGDTSYNQKFKGKATLTADKSSSTAYMQLSSLTSEDSAVYYCARSTYYGGDWYFNVWGAGTTVTVSAGGGGSGGGGSGGGGSGGGGSGGGGSTKGQIVLSQSPAILSASPGEKVTMTCRASSSVSYIHWFQQKPGSSPKPWIYATSNLASGVPVRFSGSGSGTSYSLTISRVEAEDAATYYCQQWTSNPPTFGGGTKLEIKEFPKPSTPPGSSGGAPKEFTLDFSTAKTYVDSLNVIRSAIGTPLQTISSGGTSLLMIDSGTGDNLFAVDVRGIDPEEGRFNNLRLIVERNNLYVTGFVNRTNNVFYRFADFSHVTFPGTTAVTLSGDSSYTTLQRVAGISRTGMQINRHSLTTSYLDLMSHSGTSLTQSVARAMLRFVTVTAEALRFRQIQRGFRTTLDDLSGRSYVMTAEDVDLTLNWGRLSSVLPDYHGQDSVRVGRISFGSINAILGSVALILNCHHHASRVAR

SEQ ID NO: 81 - protein, 502 aa, Artificial Sequence
  Synthetic polypeptide
  MISC_FEATURE (493)..(493): Cys residue at this position is available to form a homodimer or heterodimer via a disulfide bond with any of SEQ ID NOS 47-175
QVQLQQPGAELVKPGASVKMSCKASGYTFTSYNMHWVKQTPGRGLEWIGAIYPGNGDTSYNQKFKGKATLTADKSSSTAYMQLSSLTSEDSAVYYCARSTYYGGDWYFNVWGAGTTVTVSAGGGGSTKGQIVLSQSPAILSASPGEKVTMTCRASSSVSYIHWFQQKPGSSPKPWIYATSNLASGVPVRFSGSGSGTSYSLTISRVEAEDAATYYCQQWTSNPPTFGGGTKLEIKEFPKPSTPPGSSGGAPKEFTLDFSTAKTYVDSLNVIRSAIGTPLQTISSGGTSLLMIDSGSGDNLFAVDVRGIAPEEGRFNNLRLIVERNNLYVTGFVNRTNNVFYRFADFSHVTFPGTTAVTLSADSSYTTLQRVAGISRTGMQINRHSLTTSYLDLMSHSATSLTQSVARAMLRFVTVTAEALRFRQIQRGFRTTLDDLSGASYVMTAEDVDLTLNWGRLSSVLPDYHGQDSVRVGRISFGSINAILGSVALILNCHHHASRVAR

SEQ ID NO: 82 - protein, 512 aa, Artificial Sequence
  Synthetic polypeptide
  MISC_FEATURE (503)..(503): Cys residue at this position is available to form a homodimer or heterodimer via a disulfide bond with any of SEQ ID NOS 47-175
QVQLQQPGAELVKPGASVKMSCKASGYTFTSYNMHWVKQTPGRGLEWIGAIYPGNGDTSYNQKFKGKATLTADKSSSTAYMQLSSLTSEDSAVYYCARSTYYGGDWYFNVWGAGTTVTVSAGSTSGSGKPGSGEGSTKGQIVLSQSPAILSASPGEKVTMTCRASSSVSYIHWFQQKPGSSPKPWIYATSNLASGVPVRFSGSGSGTSYSLTISRVEAEDAATYYCQQWTSNPPTFGGGTKLEIKEFPKPSTPPGSSGGAPKEFTLDFSTAKTYVDSLNVIRSAIGTPLQTISSGGTSLLMIDNLVPMVATVVDVRGIDPEEGRFNNLRLIVERNNLYVTGFVNRTNNVFYRFADFSHVTFPGTTAVTLSGDSSYTTLQRVAGISRTGMQINRHSLTTSYLDLMSHSGTSLTQSVARAMLRFVTVTAEALRFRQIQRGFRTTLDDLSGRSYVMTAEDVDLTLNWGRLSSVLPDYHGQDSVRVGRISFGSINAILGSVALILNCHHHASRVAR

SEQ ID NO: 83 - protein, 521 aa, Artificial Sequence
  Synthetic polypeptide
  MISC_FEATURE (512)..(512): Cys residue at this position is available to form a homodimer or heterodimer via a disulfide bond with any of SEQ ID NOS 47-175
QVQLQQPGAELVKPGASVKMSCKASGYTFTSYNMHWVKQTPGRGLEWIGAIYPGNGDTSYNQKFKGKATLTADKSSSTAYMQLSSLTSEDSAVYYCARSTYYGGDWYFNVWGAGTTVTVSAGSTSGSGKPGSGEGSTKGQIVLSQSPAILSASPGEKVTMTCRASSSVSYIHWFQQKPGSSPKPWIYATSNLASGVPVRFSGSGSGTSYSLTISRVEAEDAATYYCQQWTSNPPTFGGGTKLEIKEFPKPSTPPGSSGGAPGILGFVFTLKEFTLDFSTAKTYVDSLNVIRSAIGTPLQTISSGGTSLLMIDSGSGDNLFAVDVRGIDPEEGRFNNLRLIVERNNLYVTGFVNRTNNVFYRFADFSHVTFPGTTAVTLSGDSSYTTLQRVAGISRTGMQINRHSLTTSYLDLMSHSGTSLTQSVARAMLRFVTVTAEALRFRQIQRGFRTTLDDLSGRSYVMTAEDVDLTLNWGRLSSVLPDYHGQDSVRVGRISFGSINAILGSVALILNCHHHASAVAA

SEQ ID NO: 84 - protein, 516 aa, Artificial Sequence
  Synthetic polypeptide
  MISC_FEATURE (503)..(503): Cys residue at this position is available to form a homodimer or heterodimer via a disulfide bond with any of SEQ ID NOS 47-175
QVQLQQPGAELVKPGASVKMSCKASGYTFTSYNMHWVKQTPGRGLEWIGAIYPGNGDTSYNQKFKGKATLTADKSSSTAYMQLSSLTSEDSAVYYCARSTYYGGDWYFNVWGAGTTVTVSAGSTSGSGKPGSGEGSTKGQIVLSQSPAILSASPGEKVTMTCRASSSVSYIHWFQQKPGSSPKPWIYATSNLASGVPVRFSGSGSGTSYSLTISRVEAEDAATYYCQQWTSNPPTFGGGTKLEIKEFPKPSTPPGSSGGAPKEFTLDFSTAKTYVDSLNVIRSAIGTPLQTISSGGTSLLMIDSGSGDNLFAVDVRGIDPEEGRFNNLRLIVERNNLYVTGFVNRTNNVFYRFADFSHVTFPGTTAVTLSGDSSYTTLQRVAGISRTGMQINRHSLTTSYLDLMSHSGTSLTQSVARAMLRFVTVTAEALRFRQIQRGFRTTLDDLSGRSYVMTAEDVDLTLNWGRLSSVLPDYHGQDSVRVGRISFGSINAILGSVALILNCHHHASRVARKDEL

SEQ ID NO: 85 - protein, 513 aa, Artificial Sequence
  Synthetic polypeptide
  MISC_FEATURE (504)..(504): Cys residue at this position is available to form a homodimer or heterodimer via a disulfide bond with any of SEQ ID NOS 47-175
QVQLQQPGAELVKPGASVKMSCKASGYTFTSYNMHWVKQTPGRGLEWIGAIYPGNGDTSYNQKFKGKATLTADKSSSTAYMQLSSLTSEDSAVYYCARSTYYGGDWYFNVWGAGTTVTVSAGGGGSGGGGSGGGGSGGGGSGGGGSTKGQIVLSQSPAILSASPGEKVTMTCRASSSVSYIHWFQQKPGSSPKPWIYATSNLASGVPVRFSGSGSGTSYSLTISRVEAEDAATYYCQQWTSNPPTFGGGTKLEIKGGGGSGGKEFTLDFSTAKTYVDSLNVIRSAIGTPLQTISSGGTSLLMIDSGSGDNLFAVDVRGIDPEEGRFNNLRLIVERNNLYVTGFVNRTNNVFYRFADFSHVTFPGTTAVTLSGDSSYTTLQRVAGISRTGMQINRHSLTTSYLDLMSHSGTSLTQSVARAMLRFVTVTAEALRFRQIQRGFRTTLDDLSGRSYVMTAEDVDLTLNWGRLSSVLPDYHGQDSVRVGRISFGSINAILGSVALILNCHHHASRVAR

SEQ ID NO: 86 - protein, 493 aa, Artificial Sequence
  Synthetic polypeptide
  MISC_FEATURE (484)..(484): Cys residue at this position is available to form a homodimer or heterodimer via a disulfide bond with any of SEQ ID NOS 47-175
QVQLQQPGAELVKPGASVKMSCKASGYTFTSYNMHWVKQTPGRGLEWIGAIYPGNGDTSYNQKFKGKATLTADKSSSTAYMQLSSLTSEDSAVYYCARSTYYGGDWYFNVWGAGTTVTVSAGGGGSTKGQIVLSQSPAILSASPGEKVTMTCRASSSVSYIHWFQQKPGSSPKPWIYATSNLASGVPVRFSGSGSGTSYSLTISRVEAEDAATYYCQQWTSNPPTFGGGTKLEIKGGGGSGGKEFTLDFSTAKTYVDSLNVIRSAIGTPLQTISSGGTSLLMIDSGTGDNLFAVDVRGIDPEEGRFNNLRLIVERNNLYVTGFVNRTNNVFYRFADFSHVTFPGTTAVTLSGDSSYTTLQRVAGISRTGMQINRHSLTTSYLDLMSHSGTSLTQSVARAMLRFVTVTAEALRFRQIQRGFRTTLDDLSGRSYVMTAEDVDLTLNWGRLSSVLPDYHGQDSVRVGRISFGSINAILGSVALILNCHHHASRVAR

SEQ ID NO: 87 - protein, 508 aa, Artificial Sequence
  Synthetic polypeptide
  MISC_FEATURE (503)..(503): Cys residue at this position is available to form a homodimer or heterodimer via a disulfide bond with any of SEQ ID NOS 47-175
QVQLQQPGAELVKPGASVKMSCKASGYTFTSYNMHWVKQTPGRGLEWIGAIYPGNGDTSYNQKFKGKATLTADKSSSTAYMQLSSLTSEDSAVYYCARSTYYGGDWYFNVWGAGTTVTVSAGSTSGSGKPGSGEGSTKGQIVLSQSPAILSASPGEKVTMTCRASSSVSYIHWFQQKPGSSPKPWIYATSNLASGVPVRFSGSGSGTSYSLTISRVEAEDAATYYCQQWTSNPPTFGGGTKLEIKEFPKPSTPPGSSGGAPKEFTLDFSTAKTYVDSLNVIRSAIGTPLQTISSGGTSLLMIDSGSGDNLFAVDVRGIAPEEGRFNNLRLIVERNNLYVTGFVNRTNNVFYRFADFSHVTFPGTTAVTLSADSSYTTLQRVAGISRTGMQINRHSLTTSYLDLMSHSATSLTQSVARAMLRFVTVTAEALRFRQIQRGFRTTLDDLSGASYVMTAEDVDLTLNWGRLSSVLPDYHGQDSVRVGRISFGSINAILGSVALILNCHHHAS

SEQ ID NO: 88 - protein, 512 aa, Artificial Sequence; identical to SEQ ID NO: 82
  Synthetic polypeptide
  MISC_FEATURE (503)..(503): Cys residue at this position is available to form a homodimer or heterodimer via a disulfide bond with any of SEQ ID NOS 47-175

SEQ ID NO: 89 - protein, 521 aa, Artificial Sequence
  Synthetic polypeptide
  MISC_FEATURE (512)..(512): Cys residue at this position is available to form a homodimer or heterodimer via a disulfide bond with any of SEQ ID NOS 47-175
QVQLQQPGAELVKPGASVKMSCKASGYTFTSYNMHWVKQTPGRGLEWIGAIYPGNGDTSYNQKFKGKATLTADKSSSTAYMQLSSLTSEDSAVYYCARSTYYGGDWYFNVWGAGTTVTVSAGSTSGSGKPGSGEGSTKGQIVLSQSPAILSASPGEKVTMTCRASSSVSYIHWFQQKPGSSPKPWIYATSNLASGVPVRFSGSGSGTSYSLTISRVEAEDAATYYCQQWTSNPPTFGGGTKLEIKEFPKPSTPPGSSGGAPGILGFVFTLKEFTLDFSTAKTYVDSLNVIRSAIGTPLQTISSGGTSLLMIDSGSGDNLFAVDVRGIDPEEGRFNNLRLIVERNNLYVTGFVNRTNNVFYRFADFSHVTFPGTTAVTLSGDSSYTTLQRVAGISRTGMQINRHSLTTSYLDLMSHSGTSLTQSVARAMLRFVTVTAEALRFRQIQRGFRTTLDDLSGRSYVMTAEDVDLTLNWGRLSSVLPDYHGQDSVRVGRISFGSINAILGSVALILNCHHHASKDEL

SEQ ID NO: 90 - protein, 511 aa, Artificial Sequence
  Synthetic polypeptide
  MISC_FEATURE (502)..(502): Cys residue at this position is available to form a homodimer or heterodimer via a disulfide bond with any of SEQ ID NOS 47-175
EIVLTQSPATLSLSPGERATLSCRASQSVSSYLAWYQQKPGQAPRLLIYDASNRATGIPARFSGSGSGTDFTLTISSLEPEDFAVYYCQQRSNWPITFGQGTRLEIKGSTSGSGKPGSGEGSEVQLVESGGGLVQPGRSLRLSCAASGFTFNDYAMHWVRQAPGKGLEWVSTISWNSGSIGYADSVKGRFTISRDNAKKSLYLQMNSLRAEDTALYYCAKDIQYGNYYYGMDVWGQGTTVTVSSEFPKPSTPPGSSGGAPKEFTLDFSTAKTYVDSLNVIRSAIGTPLQTISSGGTSLLMIDSGSGDNLFAVDVRGIDPEEGRFNNLRLIVERNNLYVTGFVNRTNNVFYRFADFSHVTFPGTTAVTLSGDSSYTTLQRVAGISRTGMQINRHSLTTSYLDLMSHSGTSLTQSVARAMLRFVTVTAEALRFRQIQRGFRTTLDDLSGRSYVMTAEDVDLTLNWGRLSSVLPDYHGQDSVRVGRISFGSINAILGSVALILNCHHHASRVAR

SEQ ID NO: 91 - protein, 501 aa, Artificial Sequence
  Synthetic polypeptide
  MISC_FEATURE (492)..(492): Cys residue at this position is available to form a homodimer or heterodimer via a disulfide bond with any of SEQ ID NOS 47-175
EIVLTQSPATLSLSPGERATLSCRASQSVSSYLAWYQQKPGQAPRLLIYDASNRATGIPARFSGSGSGTDFTLTISSLEPEDFAVYYCQQRSNWPITFGQGTRLEIKGGGGSEVQLVESGGGLVQPGRSLRLSCAASGFTFNDYAMHWVRQAPGKGLEWVSTISWNSGSIGYADSVKGRFTISRDNAKKSLYLQMNSLRAEDTALYYCAKDIQYGNYYYGMDVWGQGTTVTVSSEFPKPSTPPGSSGGAPKEFTLDFSTAKTYVDSLNVIRSAIGTPLQTISSGGTSLLMIDSGSGDNLFAVDVRGIDPEEGRFNNLRLIVERNNLYVTGFVNRTNNVFYRFADFSHVTFPGTTAVTLSGDSSYTTLQRVAGISRTGMQINRHSLTTSYLDLMSHSGTSLTQSVARAMLRFVTVTAEALRFRQIQRGFRTTLDDLSGRSYVMTAEDVDLTLNWGRLSSVLPDYHGQDSVRVGRISFGSINAILGSVALILNCHHHASRVAR

SEQ ID NO: 92 - protein, 511 aa, Artificial Sequence
  Synthetic polypeptide
  MISC_FEATURE (502)..(502): Cys residue at this position is available to form a homodimer or heterodimer via a disulfide bond with any of SEQ ID NOS 47-175
EIVLTQSPATLSLSPGERATLSCRASQSVSSYLAWYQQKPGQAPRLLIYDASNRATGIPARFSGSGSGTDFTLTISSLEPEDFAVYYCQQRSNWPITFGQGTRLEIKGSTSGSGKPGSGEGSEVQLVESGGGLVQPGRSLRLSCAASGFTFNDYAMHWVRQAPGKGLEWVSTISWNSGSIGYADSVKGRFTISRDNAKKSLYLQMNSLRAEDTALYYCAKDIQYGNYYYGMDVWGQGTTVTVSSEFPKPSTPPGSSGGAPKEFTLDFSTAKTYVDSLNVIRSAIGTPLQTISSGGTSLLMIDSGTGDNLFAVDVRGIDPEEGRFNNLRLIVERNNLYVTGFVNRTNNVFYRFADFSHVTFPGTTAVTLSGDSSYTTLQRVAGISRTGMQINRHSLTTSYLDLMSHSGTSLTQSVARAMLRFVTVTAEALRFRQIQRGFRTTLDDLSGRSYVMTAEDVDLTLNWGRLSSVLPDYHGQDSVRVGRISFGSINAILGSVALILNCHHHASRVAR

SEQ ID NO: 93 - protein, 511 aa, Artificial Sequence
  Synthetic polypeptide
  MISC_FEATURE (502)..(502): Cys residue at this position is available to form a homodimer or heterodimer via a disulfide bond with any of SEQ ID NOS 47-175
EIVLTQSPATLSLSPGERATLSCRASQSVSSYLAWYQQKPGQAPRLLIYDASNRATGIPARFSGSGSGTDFTLTISSLEPEDFAVYYCQQRSNWPITFGQGTRLEIKGSTSGSGKPGSGEGSEVQLVESGGGLVQPGRSLRLSCAASGFTFNDYAMHWVRQAPGKGLEWVSTISWNSGSIGYADSVKGRFTISRDNAKKSLYLQMNSLRAEDTALYYCAKDIQYGNYYYGMDVWGQGTTVTVSSEFPKPSTPPGSSGGAPKEFTLDFSTAKTYVDSLNVIRSAIGTPLQTISSGGTSLLMIDSGSGDNLFAVDVRGIAPEEGRFNNLRLIVERNNLYVTGFVNRTNNVFYRFADFSHVTFPGTTAVTLSADSSYTTLQRVAGISRTGMQINRHSLTTSYLDLMSHSATSLTQSVARAMLRFVTVTAEALRFRQIQRGFRTTLDDLSGASYVMTAEDVDLTLNWGRLSSVLPDYHGQDSVRVGRISFGSINAILGSVALILNCHHHASRVAR

SEQ ID NO: 94 - protein, 512 aa, Artificial Sequence
  Synthetic polypeptide
  MISC_FEATURE (503)..(503): Cys residue at this position is available to form a homodimer or heterodimer via a disulfide bond with any of SEQ ID NOS 47-175
EIVLTQSPATLSLSPGERATLSCRASQSVSSYLAWYQQKPGQAPRLLIYDASNRATGIPARFSGSGSGTDFTLTISSLEPEDFAVYYCQQRSNWPITFGQGTRLEIKGGGGSGGGGSGGGGSGGGGSGGGGSEVQLVESGGGLVQPGRSLRLSCAASGFTFNDYAMHWVRQAPGKGLEWVSTISWNSGSIGYADSVKGRFTISRDNAKKSLYLQMNSLRAEDTALYYCAKDIQYGNYYYGMDVWGQGTTVTVSSGGGGSGGKEFTLDFSTAKTYVDSLNVIRSAIGTPLQTISSGGTSLLMIDNLVPMVATVVDVRGIDPEEGRFNNLRLIVERNNLYVTGFVNRTNNVFYRFADFSHVTFPGTTAVTLSGDSSYTTLQRVAGISRTGMQINRHSLTTSYLDLMSHSGTSLTQSVARAMLRFVTVTAEALRFRQIQRGFRTTLDDLSGRSYVMTAEDVDLTLNWGRLSSVLPDYHGQDSVRVGRISFGSINAILGSVALILNCHHHASRVAR

SEQ ID NO: 95 - protein, 521 aa, Artificial Sequence
  Synthetic polypeptide
  MISC_FEATURE (512)..(512): Cys residue at this position is available to form a homodimer or heterodimer via a disulfide bond with any of SEQ ID NOS 47-175
EIVLTQSPATLSLSPGERATLSCRASQSVSSYLAWYQQKPGQAPRLLIYDASNRATGIPARFSGSGSGTDFTLTISSLEPEDFAVYYCQQRSNWPITFGQGTRLEIKGGGGSGGGGSGGGGSGGGGSGGGGSEVQLVESGGGLVQPGRSLRLSCAASGFTFNDYAMHWVRQAPGKGLEWVSTISWNSGSIGYADSVKGRFTISRDNAKKSLYLQMNSLRAEDTALYYCAKDIQYGNYYYGMDVWGQGTTVTVSSEFPKPSTPPGSSGGAPKEFTLDFSTAKTYVDSLNVIRSAIGTPLQTISSGGTSLLMIDSGSGDNLFAVDVRGIDPEEGRFNNLRLIVERNNLYVTGFVNRTNNVFYRFADFSHVTFPGTTAVTLSGDSSYTTLQRVAGISRTGMQINRHSLTTSYLDLMSHSGTSLTQSVARAMLRFVTVTAEALRFRQIQRGFRTTLDDLSGRSYVMTAEDVDLTLNWGRLSSVLPDYHGQDSVRVGRISFGSINAILGSVALILNCHHHASAVAA

SEQ ID NO: 96 - protein, 514 aa, Artificial Sequence
  Synthetic polypeptide
  MISC_FEATURE (501)..(501): Cys residue at this position is available to form a homodimer or heterodimer via a disulfide bond with any of SEQ ID NOS 47-175
QIVLSQSPAILSASPGEKVTMTCRASSSVSYMHWYQQKPGSSPKPWIYAPSNLASGVPARFSGSGSGTSYSLTISRVEAEDAATYYCQQWSFNPPTFGAGTKLELKSGSTSGSGKPGSGEGSQAYLQQSGAELVRPGASVKMSCKASGYTFTSYNMHWVKQTPRQGLEWIGAIYPGNGDTSYNQKFKGKATLTVDKSSSTAYMQLSSLTSEDSAVYFCARVVYYSNSYWYFDVWGTGTTVTVSEFPKPSTPPGSSGGAPKEFTLDFSTAKTYVDSLNVIRSAIGTPLQTISSGGTSLLMIDSGSGDNLFAVDVRGIDPEEGRFNNLRLIVERNNLYVTGFVNRTNNVFYRFADFSHVTFPGTTAVTLSGDSSYTTLQRVAGISRTGMQINRHSLTTSYLDLMSHSGTSLTQSVARAMLRFVTVTAEALRFRQIQRGFRTTLDDLSGRSYVMTAEDVDLTLNWGRLSSVLPDYHGQDSVRVGRISFGSINAILGSVALILNCHHHASRVARKDEL

SEQ ID NO: 97 - protein, 511 aa, Artificial Sequence
  Synthetic polypeptide
  MISC_FEATURE (502)..(502): Cys residue at this position is available to form a homodimer or heterodimer via a disulfide bond with any of SEQ ID NOS 47-175
QIVLSQSPAILSASPGEKVTMTCRASSSVSYMHWYQQKPGSSPKPWIYAPSNLASGVPARFSGSGSGTSYSLTISRVEAEDAATYYCQQWSFNPPTFGAGTKLELKSGGGGSGGGGSGGGGSGGGGSGGGGSQAYLQQSGAELVRPGASVKMSCKASGYTFTSYNMHWVKQTPRQGLEWIGAIYPGNGDTSYNQKFKGKATLTVDKSSSTAYMQLSSLTSEDSAVYFCARVVYYSNSYWYFDVWGTGTTVTVSGGGGSGGKEFTLDFSTAKTYVDSLNVIRSAIGTPLQTISSGGTSLLMIDSGSGDNLFAVDVRGIDPEEGRFNNLRLIVERNNLYVTGFVNRTNNVFYRFADFSHVTFPGTTAVTLSGDSSYTTLQRVAGISRTGMQINRHSLTTSYLDLMSHSGTSLTQSVARAMLRFVTVTAEALRFRQIQRGFRTTLDDLSGRSYVMTAEDVDLTLNWGRLSSVLPDYHGQDSVRVGRISFGSINAILGSVALILNCHHHASRVAR

SEQ ID NO: 98 - protein, 511 aa, Artificial Sequence
  Synthetic polypeptide
  MISC_FEATURE (502)..(502): Cys residue at this position is available to form a homodimer or heterodimer via a disulfide bond with any of SEQ ID NOS 47-175
QIVLSQSPAILSASPGEKVTMTCRASSSVSYMHWYQQKPGSSPKPWIYAPSNLASGVPARFSGSGSGTSYSLTISRVEAEDAATYYCQQWSFNPPTFGAGTKLELKSGGGGSGGGGSGGGGSGGGGSGGGGSQAYLQQSGAELVRPGASVKMSCKASGYTFTSYNMHWVKQTPRQGLEWIGAIYPGNGDTSYNQKFKGKATLTVDKSSSTAYMQLSSLTSEDSAVYFCARVVYYSNSYWYFDVWGTGTTVTVSGGGGSGGKEFTLDFSTAKTYVDSLNVIRSAIGTPLQTISSGGTSLLMIDSGTGDNLFAVDVRGIDPEEGRFNNLRLIVERNNLYVTGFVNRTNNVFYRFADFSHVTFPGTTAVTLSGDSSYTTLQRVAGISRTGMQINRHSLTTSYLDLMSHSGTSLTQSVARAMLRFVTVTAEALRFRQIQRGFRTTLDDLSGRSYVMTAEDVDLTLNWGRLSSVLPDYHGQDSVRVGRISFGSINAILGSVALILNCHHHASRVAR

SEQ ID NO: 99 - protein, 497 aa, Artificial Sequence
  Synthetic polypeptide
  MISC_FEATURE (492)..(492): Cys residue at this position is available to form a homodimer or heterodimer via a disulfide bond with any of SEQ ID NOS 47-175
QIVLSQSPAILSASPGEKVTMTCRASSSVSYMHWYQQKPGSSPKPWIYAPSNLASGVPARFSGSGSGTSYSLTISRVEAEDAATYYCQQWSFNPPTFGAGTKLELKSGSTSGSGKPGSGEGSQAYLQQSGAELVRPGASVKMSCKASGYTFTSYNMHWVKQTPRQGLEWIGAIYPGNGDTSYNQKFKGKATLTVDKSSSTAYMQLSSLTSEDSAVYFCARVVYYSNSYWYFDVWGTGTTVTVSGGGGSGGKEFTLDFSTAKTYVDSLNVIRSAIGTPLQTISSGGTSLLMIDSGSGDNLFAVDVRGIAPEEGRFNNLRLIVERNNLYVTGFVNRTNNVFYRFADFSHVTFPGTTAVTLSADSSYTTLQRVAGISRTGMQINRHSLTTSYLDLMSHSATSLTQSVARAMLRFVTVTAEALRFRQIQRGFRTTLDDLSGASYVMTAEDVDLTLNWGRLSSVLPDYHGQDSVRVGRISFGSINAILGSVALILNCHHHAS

SEQ ID NO: 100 - protein, 491 aa, Artificial Sequence
  Synthetic polypeptide
  MISC_FEATURE (482)..(482): Cys residue at this position is available to form a homodimer or heterodimer via a disulfide bond with any of SEQ ID NOS 47-175
QIVLSQSPAILSASPGEKVTMTCRASSSVSYMHWYQQKPGSSPKPWIYAPSNLASGVPARFSGSGSGTSYSLTISRVEAEDAATYYCQQWSFNPPTFGAGTKLELKSGGGGSQAYLQQSGAELVRPGASVKMSCKASGYTFTSYNMHWVKQTPRQGLEWIGAIYPGNGDTSYNQKFKGKATLTVDKSSSTAYMQLSSLTSEDSAVYFCARVVYYSNSYWYFDVWGTGTTVTVSGGGGSGGKEFTLDFSTAKTYVDSLNVIRSAIGTPLQTISSGGTSLLMIDNLVPMVATVVDVRGIDPEEGRFNNLRLIVERNNLYVTGFVNRTNNVFYRFADFSHVTFPGTTAVTLSGDSSYTTLQRVAGISRTGMQINRHSLTTSYLDLMSHSGTSLTQSVARAMLRFVTVTAEALRFRQIQRGFRTTLDDLSGRSYVMTAEDVDLTLNWGRLSSVLPDYHGQDSVRVGRISFGSINAILGSVALILNCHHHASRVAR

SEQ ID NO: 101 - protein, 506 aa, Artificial Sequence
  Synthetic polypeptide
  MISC_FEATURE (501)..(501): Cys residue at this position is available to form a homodimer or heterodimer via a disulfide bond with any of SEQ ID NOS 47-175
QIVLSQSPAILSASPGEKVTMTCRASSSVSYMHWYQQKPGSSPKPWIYAPSNLASGVPARFSGSGSGTSYSLTISRVEAEDAATYYCQQWSFNPPTFGAGTKLELKSGSTSGSGKPGSGEGSQAYLQQSGAELVRPGASVKMSCKASGYTFTSYNMHWVKQTPRQGLEWIGAIYPGNGDTSYNQKFKGKATLTVDKSSSTAYMQLSSLTSEDSAVYFCARVVYYSNSYWYFDVWGTGTTVTVSEFPKPSTPPGSSGGAPKEFTLDFSTAKTYVDSLNVIRSAIGTPLQTISSGGTSLLMIDSGSGDNLFAVDVRGIDPEEGRFNNLRLIVERNNLYVTGFVNRTNNVFYRFADFSHVTFPGTTAVTLSGDSSYTTLQRVAGISRTGMQINRHSLTTSYLDLMSHSGTSLTQSVARAMLRFVTVTAEALRFRQIQRGFRTTLDDLSGRSYVMTAEDVDLTLNWGRLSSVLPDYHGQDSVRVGRISFGSINAILGSVALILNCHHHAS

SEQ ID NO: 102 - protein, 510 aa, Artificial Sequence
  Synthetic polypeptide
  MISC_FEATURE (501)..(501): Cys residue at this position is available to form a homodimer or heterodimer via a disulfide bond with any of SEQ ID NOS 47-175
QAYLQQSGAELVRPGASVKMSCKASGYTFTSYNMHWVKQTPRQGLEWIGAIYPGNGDTSYNQKFKGKATLTVDKSSSTAYMQLSSLTSEDSAVYFCARVVYYSNSYWYFDVWGTGTTVTVSGSTSGSGKPGSGEGSQIVLSQSPAILSASPGEKVTMTCRASSSVSYMHWYQQKPGSSPKPWIYAPSNLASGVPARFSGSGSGTSYSLTISRVEAEDAATYYCQQWSFNPPTFGAGTKLELKSEFPKPSTPPGSSGGAPKEFTLDFSTAKTYVDSLNVIRSAIGTPLQTISSGGTSLLMIDSGSGDNLFAVDVRGIDPEEGRFNNLRLIVERNNLYVTGFVNRTNNVFYRFADFSHVTFPGTTAVTLSGDSSYTTLQRVAGISRTGMQINRHSLTTSYLDLMSHSGTSLTQSVARAMLRFVTVTAEALRFRQIQRGFRTTLDDLSGRSYVMTAEDVDLTLNWGRLSSVLPDYHGQDSVRVGRISFGSINAILGSVALILNCHHHASRVAR

SEQ ID NO: 103 - protein, 501 aa, Artificial Sequence
  Synthetic polypeptide
  MISC_FEATURE (492)..(492): Cys residue at this position is available to form a homodimer or heterodimer via a disulfide bond with any of SEQ ID NOS 47-175
QAYLQQSGAELVRPGASVKMSCKASGYTFTSYNMHWVKQTPRQGLEWIGAIYPGNGDTSYNQKFKGKATLTVDKSSSTAYMQLSSLTSEDSAVYFCARVVYYSNSYWYFDVWGTGTTVTVSGSTSGSGKPGSGEGSQIVLSQSPAILSASPGEKVTMTCRASSSVSYMHWYQQKPGSSPKPWIYAPSNLASGVPARFSGSGSGTSYSLTISRVEAEDAATYYCQQWSFNPPTFGAGTKLELKSGGGGSGGKEFTLDFSTAKTYVDSLNVIRSAIGTPLQTISSGGTSLLMIDSGSGDNLFAVDVRGIDPEEGRFNNLRLIVERNNLYVTGFVNRTNNVFYRFADFSHVTFPGTTAVTLSGDSSYTTLQRVAGISRTGMQINRHSLTTSYLDLMSHSGTSLTQSVARAMLRFVTVTAEALRFRQIQRGFRTTLDDLSGRSYVMTAEDVDLTLNWGRLSSVLPDYHGQDSVRVGRISFGSINAILGSVALILNCHHHASRVAR

SEQ ID NO: 104 - protein, 501 aa, Artificial Sequence
  Synthetic polypeptide
  MISC_FEATURE (492)..(492): Cys residue at this position is available to form a homodimer or heterodimer via a disulfide bond with any of SEQ ID NOS 47-175
QAYLQQSGAELVRPGASVKMSCKASGYTFTSYNMHWVKQTPRQGLEWIGAIYPGNGDTSYNQKFKGKATLTVDKSSSTAYMQLSSLTSEDSAVYFCARVVYYSNSYWYFDVWGTGTTVTVSGSTSGSGKPGSGEGSQIVLSQSPAILSASPGEKVTMTCRASSSVSYMHWYQQKPGSSPKPWIYAPSNLASGVPARFSGSGSGTSYSLTISRVEAEDAATYYCQQWSFNPPTFGAGTKLELKSGGGGSGGKEFTLDFSTAKTYVDSLNVIRSAIGTPLQTISSGGTSLLMIDSGTGDNLFAVDVRGIDPEEGRFNNLRLIVERNNLYVTGFVNRTNNVFYRFADFSHVTFPGTTAVTLSGDSSYTTLQRVAGISRTGMQINRHSLTTSYLDLMSHSGTSLTQSVARAMLRFVTVTAEALRFRQIQRGFRTTLDDLSGRSYVMTAEDVDLTLNWGRLSSVLPDYHGQDSVRVGRISFGSINAILGSVALILNCHHHASRVAR

SEQ ID NO: 105 - protein, 491 aa, Artificial Sequence
  Synthetic polypeptide
  MISC_FEATURE (482)..(482): Cys residue at this position is available to form a homodimer or heterodimer via a disulfide bond with any of SEQ ID NOS 47-175
QAYLQQSGAELVRPGASVKMSCKASGYTFTSYNMHWVKQTPRQGLEWIGAIYPGNGDTSYNQKFKGKATLTVDKSSSTAYMQLSSLTSEDSAVYFCARVVYYSNSYWYFDVWGTGTTVTVSGGGGSQIVLSQSPAILSASPGEKVTMTCRASSSVSYMHWYQQKPGSSPKPWIYAPSNLASGVPARFSGSGSGTSYSLTISRVEAEDAATYYCQQWSFNPPTFGAGTKLELKSGGGGSGGKEFTLDFSTAKTYVDSLNVIRSAIGTPLQTISSGGTSLLMIDSGSGDNLFAVDVRGIAPEEGRFNNLRLIVERNNLYVTGFVNRTNNVFYRFADFSHVTFPGTTAVTLSADSSYTTLQRVAGISRTGMQINRHSLTTSYLDLMSHSATSLTQSVARAMLRFVTVTAEALRFRQIQRGFRTTLDDLSGASYVMTAEDVDLTLNWGRLSSVLPDYHGQDSVRVGRISFGSINAILGSVALILNCHHHASRVAR

SEQ ID NO: 106 - protein, 524 aa, Artificial Sequence
  Synthetic polypeptide
  MISC_FEATURE (511)..(511): Cys residue at this position is available to form a homodimer or heterodimer via a disulfide bond with any of SEQ ID NOS 47-175
QAYLQQSGAELVRPGASVKMSCKASGYTFTSYNMHWVKQTPRQGLEWIGAIYPGNGDTSYNQKFKGKATLTVDKSSSTAYMQLSSLTSEDSAVYFCARVVYYSNSYWYFDVWGTGTTVTVSGGGGSGGGGSGGGGSGGGGSGGGGSQIVLSQSPAILSASPGEKVTMTCRASSSVSYMHWYQQKPGSSPKPWIYAPSNLASGVPARFSGSGSGTSYSLTISRVEAEDAATYYCQQWSFNPPTFGAGTKLELKSEFPKPSTPPGSSGGAPKEFTLDFSTAKTYVDSLNVIRSAIGTPLQTISSGGTSLLMIDNLVPMVATVVDVRGIDPEEGRFNNLRLIVERNNLYVTGFVNRTNNVFYRFADFSHVTFPGTTAVTLSGDSSYTTLQRVAGISRTGMQINRHSLTTSYLDLMSHSGTSLTQSVARAMLRFVTVTAEALRFRQIQRGFRTTLDDLSGRSYVMTAEDVDLTLNWGRLSSVLPDYHGQDSVRVGRISFGSINAILGSVALILNCHHHASRVARKDEL

SEQ ID NO: 107 - protein, 491 aa, Artificial Sequence
  Synthetic polypeptide
  MISC_FEATURE (482)..(482): Cys residue at this position is available to form a homodimer or heterodimer via a disulfide bond with any of SEQ ID NOS 47-175
QAYLQQSGAELVRPGASVKMSCKASGYTFTSYNMHWVKQTPRQGLEWIGAIYPGNGDTSYNQKFKGKATLTVDKSSSTAYMQLSSLTSEDSAVYFCARVVYYSNSYWYFDVWGTGTTVTVSGGGGSQIVLSQSPAILSASPGEKVTMTCRASSSVSYMHWYQQKPGSSPKPWIYAPSNLASGVPARFSGSGSGTSYSLTISRVEAEDAATYYCQQWSFNPPTFGAGTKLELKSGGGGSGGKEFTLDFSTAKTYVDSLNVIRSAIGTPLQTISSGGTSLLMIDSGSGDNLFAVDVRGIDPEEGRFNNLRLIVERNNLYVTGFVNRTNNVFYRFADFSHVTFPGTTAVTLSGDSSYTTLQRVAGISRTGMQINRHSLTTSYLDLMSHSGTSLTQSVARAMLRFVTVTAEALRFRQIQRGFRTTLDDLSGRSYVMTAEDVDLTLNWGRLSSVLPDYHGQDSVRVGRISFGSINAILGSVALILNCHHHASAVAA

SEQ ID NO: 108 - protein, 513 aa, Artificial Sequence
  Synthetic polypeptide
  MISC_FEATURE (504)..(504): Cys residue at this position is available to form a homodimer or heterodimer via a disulfide bond with any of SEQ ID NOS 47-175
QVQLVQSGAEVKKPGSSVKVSCKASGYAFSYSWINWVRQAPGQGLEWMGRIFPGDGDTDYNGKFKGRVTITADKSTSTAYMELSSLRSEDTAVYYCARNVFDGYWLVYWGQGTLVTVSSGSTSGSGKPGSGEGSDIVMTQTPLSLPVTPGEPASISCRSSKSLLHSNGITYLYWYLQKPGQSPQLLIYQMSNLVSGVPDRFSGSGSGTDFTLKISRVEAEDVGVYYCAQNLELPYTFGGGTKVEIKEFPKPSTPPGSSGGAPKEFTLDFSTAKTYVDSLNVIRSAIGTPLQTISSGGTSLLMIDSGSGDNLFAVDVRGIDPEEGRFNNLRLIVERNNLYVTGFVNRTNNVFYRFADFSHVTFPGTTAVTLSGDSSYTTLQRVAGISRTGMQINRHSLTTSYLDLMSHSGTSLTQSVARAMLRFVTVTAEALRFRQIQRGFRTTLDDLSGRSYVMTAEDVDLTLNWGRLSSVLPDYHGQDSVRVGRISFGSINAILGSVALILNCHHHASRVAR

SEQ ID NO: 109 - protein, 522 aa, Artificial Sequence
  Synthetic polypeptide
  MISC_FEATURE (513)..(513): Cys residue at this position is available to form a homodimer or heterodimer via a disulfide bond with any of SEQ ID NOS 47-175
QVQLVQSGAEVKKPGSSVKVSCKASGYAFSYSWINWVRQAPGQGLEWMGRIFPGDGDTDYNGKFKGRVTITADKSTSTAYMELSSLRSEDTAVYYCARNVFDGYWLVYWGQGTLVTVSSGSTSGSGKPGSGEGSDIVMTQTPLSLPVTPGEPASISCRSSKSLLHSNGITYLYWYLQKPGQSPQLLIYQMSNLVSGVPDRFSGSGSGTDFTLKISRVEAEDVGVYYCAQNLELPYTFGGGTKVEIKEFPKPSTPPGSSGGAPGILGFVFTLKEFTLDFSTAKTYVDSLNVIRSAIGTPLQTISSGGTSLLMIDSGSGDNLFAVDVRGIDPEEGRFNNLRLIVERNNLYVTGFVNRTNNVFYRFADFSHVTFPGTTAVTLSGDSSYTTLQRVAGISRTGMQINRHSLTTSYLDLMSHSGTSLTQSVARAMLRFVTVTAEALRFRQIQRGFRTTLDDLSGRSYVMTAEDVDLTLNWGRLSSVLPDYHGQDSVRVGRISFGSINAILGSVALILNCHHHASRVAR

SEQ ID NO: 110 - protein, 512 aa, Artificial Sequence
  Synthetic polypeptide
  MISC_FEATURE (503)..(503): Cys residue at this position is available to form a homodimer or heterodimer via a disulfide bond with any of SEQ ID NOS 47-175
QVQLVQSGAEVKKPGSSVKVSCKASGYAFSYSWINWVRQAPGQGLEWMGRIFPGDGDTDYNGKFKGRVTITADKSTSTAYMELSSLRSEDTAVYYCARNVFDGYWLVYWGQGTLVTVSSGGGGSDIVMTQTPLSLPVTPGEPASISCRSSKSLLHSNGITYLYWYLQKPGQSPQLLIYQMSNLVSGVPDRFSGSGSGTDFTLKISRVEAEDVGVYYCAQNLELPYTFGGGTKVEIKEFPKPSTPPGSSGGAPGILGFVFTLKEFTLDFSTAKTYVDSLNVIRSAIGTPLQTISSGGTSLLMIDSGTGDNLFAVDVRGIDPEEGRFNNLRLIVERNNLYVTGFVNRTNNVFYRFADFSHVTFPGTTAVTLSGDSSYTTLQRVAGISRTGMQINRHSLTTSYLDLMSHSGTSLTQSVARAMLRFVTVTAEALRFRQIQRGFRTTLDDLSGRSYVMTAEDVDLTLNWGRLSSVLPDYHGQDSVRVGRISFGSINAILGSVALILNCHHHASRVAR

SEQ ID NO: 111 - protein, 508 aa, Artificial Sequence
  Synthetic polypeptide
  MISC_FEATURE (503)..(503): Cys residue at this position is available to form a homodimer or heterodimer via a disulfide bond with any of SEQ ID NOS 47-175
QVQLVQSGAEVKKPGSSVKVSCKASGYAFSYSWINWVRQAPGQGLEWMGRIFPGDGDTDYNGKFKGRVTITADKSTSTAYMELSSLRSEDTAVYYCARNVFDGYWLVYWGQGTLVTVSSGGGGSDIVMTQTPLSLPVTPGEPASISCRSSKSLLHSNGITYLYWYLQKPGQSPQLLIYQMSNLVSGVPDRFSGSGSGTDFTLKISRVEAEDVGVYYCAQNLELPYTFGGGTKVEIKEFPKPSTPPGSSGGAPGILGFVFTLKEFTLDFSTAKTYVDSLNVIRSAIGTPLQTISSGGTSLLMIDSGSGDNLFAVDVRGIAPEEGRFNNLRLIVERNNLYVTGFVNRTNNVFYRFADFSHVTFPGTTAVTLSADSSYTTLQRVAGISRTGMQINRHSLTTSYLDLMSHSATSLTQSVARAMLRFVTVTAEALRFRQIQRGFRTTLDDLSGASYVMTAEDVDLTLNWGRLSSVLPDYHGQDSVRVGRISFGSINAILGSVALILNCHHHAS

SEQ ID NO: 112 - protein, 503 aa, Artificial Sequence
  Synthetic polypeptide
  MISC_FEATURE (494)..(494): Cys residue at this position is available to form a homodimer or heterodimer via a disulfide bond with any of SEQ ID NOS 47-175
QVQLVQSGAEVKKPGSSVKVSCKASGYAFSYSWINWVRQAPGQGLEWMGRIFPGDGDTDYNGKFKGRVTITADKSTSTAYMELSSLRSEDTAVYYCARNVFDGYWLVYWGQGTLVTVSSGGGGSDIVMTQTPLSLPVTPGEPASISCRSSKSLLHSNGITYLYWYLQKPGQSPQLLIYQMSNLVSGVPDRFSGSGSGTDFTLKISRVEAEDVGVYYCAQNLELPYTFGGGTKVEIKEFPKPSTPPGSSGGAPKEFTLDFSTAKTYVDSLNVIRSAIGTPLQTISSGGTSLLMIDNLVPMVATVVDVRGIDPEEGRFNNLRLIVERNNLYVTGFVNRTNNVFYRFADFSHVTFPGTTAVTLSGDSSYTTLQRVAGISRTGMQINRHSLTTSYLDLMSHSGTSLTQSVARAMLRFVTVTAEALRFRQIQRGFRTTLDDLSGRSYVMTAEDVDLTLNWGRLSSVLPDYHGQDSVRVGRISFGSINAILGSVALILNCHHHASRVAR

SEQ ID NO: 113 - protein, 500 aa, Artificial Sequence
  Synthetic polypeptide
  MISC_FEATURE (495)..(495): Cys residue at this position is available to form a homodimer or heterodimer via a disulfide bond with any of SEQ ID NOS 47-175
QVQLVQSGAEVKKPGSSVKVSCKASGYAFSYSWINWVRQAPGQGLEWMGRIFPGDGDTDYNGKFKGRVTITADKSTSTAYMELSSLRSEDTAVYYCARNVFDGYWLVYWGQGTLVTVSSGSTSGSGKPGSGEGSDIVMTQTPLSLPVTPGEPASISCRSSKSLLHSNGITYLYWYLQKPGQSPQLLIYQMSNLVSGVPDRFSGSGSGTDFTLKISRVEAEDVGVYYCAQNLELPYTFGGGTKVEIKGGGGSGGKEFTLDFSTAKTYVDSLNVIRSAIGTPLQTISSGGTSLLMIDSGSGDNLFAVDVRGIDPEEGRFNNLRLIVERNNLYVTGFVNRTNNVFYRFADFSHVTFPGTTAVTLSGDSSYTTLQRVAGISRTGMQINRHSLTTSYLDLMSHSGTSLTQSVARAMLRFVTVTAEALRFRQIQRGFRTTLDDLSGRSYVMTAEDVDLTLNWGRLSSVLPDYHGQDSVRVGRISFGSINAILGSVALILNCHHHAS

SEQ ID NO: 114 - protein, 513 aa, Artificial Sequence
  Synthetic polypeptide
  MISC_FEATURE (504)..(504): Cys residue at this position is available to form a homodimer or heterodimer via a disulfide bond with any of SEQ ID NOS 47-175
DIVMTQTPLSLPVTPGEPASISCRSSKSLLHSNGITYLYWYLQKPGQSPQLLIYQMSNLVSGVPDRFSGSGSGTDFTLKISRVEAEDVGVYYCAQNLELPYTFGGGTKVEIKGSTSGSGKPGSGEGSQVQLVQSGAEVKKPGSSVKVSCKASGYAFSYSWINWVRQAPGQGLEWMGRIFPGDGDTDYNGKFKGRVTITADKSTSTAYMELSSLRSEDTAVYYCARNVFDGYWLVYWGQGTLVTVSSEFPKPSTPPGSSGGAPKEFTLDFSTAKTYVDSLNVIRSAIGTPLQTISSGGTSLLMIDSGSGDNLFAVDVRGIDPEEGRFNNLRLIVERNNLYVTGFVNRTNNVFYRFADFSHVTFPGTTAVTLSGDSSYTTLQRVAGISRTGMQINRHSLTTSYLDLMSHSGTSLTQSVARAMLRFVTVTAEALRFRQIQRGFRTTLDDLSGRSYVMTAEDVDLTLNWGRLSSVLPDYHGQDSVRVGRISFGSINAILGSVALILNCHHHASRVAR

SEQ ID NO: 115 - protein, 516 aa, Artificial Sequence
  Synthetic polypeptide
  MISC_FEATURE (503)..(503): Cys residue at this position is available to form a homodimer or heterodimer via a disulfide bond with any of SEQ ID NOS 47-175
DIVMTQTPLSLPVTPGEPASISCRSSKSLLHSNGITYLYWYLQKPGQSPQLLIYQMSNLVSGVPDRFSGSGSGTDFTLKISRVEAEDVGVYYCAQNLELPYTFGGGTKVEIKGGGGSQVQLVQSGAEVKKPGSSVKVSCKASGYAFSYSWINWVRQAPGQGLEWMGRIFPGDGDTDYNGKFKGRVTITADKSTSTAYMELSSLRSEDTAVYYCARNVFDGYWLVYWGQGTLVTVSSEFPKPSTPPGSSGGAPGILGFVFTLKEFTLDFSTAKTYVDSLNVIRSAIGTPLQTISSGGTSLLMIDSGSGDNLFAVDVRGIDPEEGRFNNLRLIVERNNLYVTGFVNRTNNVFYRFADFSHVTFPGTTAVTLSGDSSYTTLQRVAGISRTGMQINRHSLTTSYLDLMSHSGTSLTQSVARAMLRFVTVTAEALRFRQIQRGFRTTLDDLSGRSYVMTAEDVDLTLNWGRLSSVLPDYHGQDSVRVGRISFGSINAILGSVALILNCHHHASRVARKDEL

SEQ ID NO: 116 - protein, 522 aa, Artificial Sequence
  Synthetic polypeptide
  MISC_FEATURE (513)..(513): Cys residue at this position is available to form a homodimer or heterodimer via a disulfide bond with any of SEQ ID NOS 47-175
DIVMTQTPLSLPVTPGEPASISCRSSKSLLHSNGITYLYWYLQKPGQSPQLLIYQMSNLVSGVPDRFSGSGSGTDFTLKISRVEAEDVGVYYCAQNLELPYTFGGGTKVEIKGSTSGSGKPGSGEGSQVQLVQSGAEVKKPGSSVKVSCKASGYAFSYSWINWVRQAPGQGLEWMGRIFPGDGDTDYNGKFKGRVTITADKSTSTAYMELSSLRSEDTAVYYCARNVFDGYWLVYWGQGTLVTVSSEFPKPSTPPGSSGGAPGILGFVFTLKEFTLDFSTAKTYVDSLNVIRSAIGTPLQTISSGGTSLLMIDSGTGDNLFAVDVRGIDPEEGRFNNLRLIVERNNLYVTGFVNRTNNVFYRFADFSHVTFPGTTAVTLSGDSSYTTLQRVAGISRTGMQINRHSLTTSYLDLMSHSGTSLTQSVARAMLRFVTVTAEALRFRQIQRGFRTTLDDLSGRSYVMTAEDVDLTLNWGRLSSVLPDYHGQDSVRVGRISFGSINAILGSVALILNCHHHASRVAR

SEQ ID NO: 117 - protein, 522 aa, Artificial Sequence
  Synthetic polypeptide
  MISC_FEATURE (513)..(513): Cys residue at this position is available to form a homodimer or heterodimer via a disulfide bond with any of SEQ ID NOS 47-175
DIVMTQTPLSLPVTPGEPASISCRSSKSLLHSNGITYLYWYLQKPGQSPQLLIYQMSNLVSGVPDRFSGSGSGTDFTLKISRVEAEDVGVYYCAQNLELPYTFGGGTKVEIKGSTSGSGKPGSGEGSQVQLVQSGAEVKKPGSSVKVSCKASGYAFSYSWINWVRQAPGQGLEWMGRIFPGDGDTDYNGKFKGRVTITADKSTSTAYMELSSLRSEDTAVYYCARNVFDGYWLVYWGQGTLVTVSSEFPKPSTPPGSSGGAPGILGFVFTLKEFTLDFSTAKTYVDSLNVIRSAIGTPLQTISSGGTSLLMIDSGSGDNLFAVDVRGIAPEEGRFNNLRLIVERNNLYVTGFVNRTNNVFYRFADFSHVTFPGTTAVTLSADSSYTTLQRVAGISRTGMQINRHSLTTSYLDLMSHSATSLTQSVARAMLRFVTVTAEALRFRQIQRGFRTTLDDLSGASYVMTAEDVDLTLNWGRLSSVLPDYHGQDSVRVGRISFGSINAILGSVALILNCHHHASRVAR

SEQ ID NO: 118 - protein, 503 aa, Artificial Sequence
  Synthetic polypeptide
  MISC_FEATURE (494)..(494): Cys residue at this position is available to form a homodimer or heterodimer via a disulfide bond with any of SEQ ID NOS 47-175
DIVMTQTPLSLPVTPGEPASISCRSSKSLLHSNGITYLYWYLQKPGQSPQLLIYQMSNLVSGVPDRFSGSGSGTDFTLKISRVEAEDVGVYYCAQNLELPYTFGGGTKVEIKGGGGSQVQLVQSGAEVKKPGSSVKVSCKASGYAFSYSWINWVRQAPGQGLEWMGRIFPGDGDTDYNGKFKGRVTITADKSTSTAYMELSSLRSEDTAVYYCARNVFDGYWLVYWGQGTLVTVSSEFPKPSTPPGSSGGAPKEFTLDFSTAKTYVDSLNVIRSAIGTPLQTISSGGTSLLMIDNLVPMVATVVDVRGIDPEEGRFNNLRLIVERNNLYVTGFVNRTNNVFYRFADFSHVTFPGTTAVTLSGDSSYTTLQRVAGISRTGMQINRHSLTTSYLDLMSHSGTSLTQSVARAMLRFVTVTAEALRFRQIQRGFRTTLDDLSGRSYVMTAEDVDLTLNWGRLSSVLPDYHGQDSVRVGRISFGSINAILGSVALILNCHHHASRVAR

SEQ ID NO: 119 - protein, 514 aa, Artificial Sequence
  Synthetic polypeptide
  MISC_FEATURE (505)..(505): Cys residue at this position is available to form a homodimer or heterodimer via a disulfide bond with any of SEQ ID NOS 47-175
DIVMTQTPLSLPVTPGEPASISCRSSKSLLHSNGITYLYWYLQKPGQSPQLLIYQMSNLVSGVPDRFSGSGSGTDFTLKISRVEAEDVGVYYCAQNLELPYTFGGGTKVEIKGGGGSGGGGSGGGGSGGGGSGGGGSQVQLVQSGAEVKKPGSSVKVSCKASGYAFSYSWINWVRQAPGQGLEWMGRIFPGDGDTDYNGKFKGRVTITADKSTSTAYMELSSLRSEDTAVYYCARNVFDGYWLVYWGQGTLVTVSSGGGGSGGKEFTLDFSTAKTYVDSLNVIRSAIGTPLQTISSGGTSLLMIDSGSGDNLFAVDVRGIDPEEGRFNNLRLIVERNNLYVTGFVNRTNNVFYRFADFSHVTFPGTTAVTLSGDSSYTTLQRVAGISRTGMQINRHSLTTSYLDLMSHSGTSLTQSVARAMLRFVTVTAEALRFRQIQRGFRTTLDDLSGRSYVMTAEDVDLTLNWGRLSSVLPDYHGQDSVRVGRISFGSINAILGSVALILNCHHHASAVAA

SEQ ID NO: 120 - protein, 520 aa, Artificial Sequence
  Synthetic polypeptide
  MISC_FEATURE (242)..(242): Cys residue at this position is available to form a homodimer or heterodimer via a disulfide bond with any of SEQ ID NOS 47-175
KEFTLDFSTAKTYVDSLNVIRSAIGTPLQTISSGGTSLLMIDSGSGDNLFAVDVRGIDPEEGRFNNLRLIVERNNLYVTGFVNRTNNVFYRFADFSHVTFPGTTAVTLSGDSSYTTLQRVAGISRTGMQINRHSLTTSYLDLMSHSGTSLTQSVARAMLRFVTVTAEALRFRQIQRGFRTTLDDLSGRSYVMTAEDVDLTLNWGRLSSVLPDYHGQDSVRVGRISFGSINAILGSVALILNCHHHASRVAREFPKPSTPPGSSGGAPQAYLQQSGAELVRPGASVKMSCKASGYTFTSYNMHWVKQTPRQGLEWIGAIYPGNGDTSYNQKFKGKATLTVDKSSSTAYMQLSSLTSEDSAVYFCARVVYYSNSYWYFDVWGTGTTVTVSGGGGSGGGGSGGGGSGGGGSGGGGSQIVLSQSPAILSASPGEKVTMTCRASSSVSYMHWYQQKPGSSPKPWIYAPSNLASGVPARFSGSGSGTSYSLTISRVEAEDAATYYCQQWSFNPPTFGAGTKLELKS

SEQ ID NO: 121 - protein, 510 aa, Artificial Sequence
  Synthetic polypeptide
  MISC_FEATURE (242)..(242): Cys residue at this position is available to form a homodimer or heterodimer via a disulfide bond with any of SEQ ID NOS 47-175
KEFTLDFSTAKTYVDSLNVIRSAIGTPLQTISSGGTSLLMIDSGSGDNLFAVDVRGIDPEEGRFNNLRLIVERNNLYVTGFVNRTNNVFYRFADFSHVTFPGTTAVTLSGDSSYTTLQRVAGISRTGMQINRHSLTTSYLDLMSHSGTSLTQSVARAMLRFVTVTAEALRFRQIQRGFRTTLDDLSGRSYVMTAEDVDLTLNWGRLSSVLPDYHGQDSVRVGRISFGSINAILGSVALILNCHHHASRVAREFPKPSTPPGSSGGAPQAYLQQSGAELVRPGASVKMSCKASGYTFTSYNMHWVKQTPRQGLEWIGAIYPGNGDTSYNQKFKGKATLTVDKSSSTAYMQLSSLTSEDSAVYFCARVVYYSNSYWYFDVWGTGTTVTVSGSTSGSGKPGSGEGSQIVLSQSPAILSASPGEKVTMTCRASSSVSYMHWYQQKPGSSPKPWIYAPSNLASGVPARFSGSGSGTSYSLTISRVEAEDAATYYCQQWSFNPPTFGAGTKLELKS

SEQ ID NO: 122 - protein, 500 aa, Artificial Sequence
  Synthetic polypeptide
  MISC_FEATURE (242)..(242): Cys residue at this position is available to form a homodimer or heterodimer via a disulfide bond with any of SEQ ID NOS 47-175
KEFTLDFSTAKTYVDSLNVIRSAIGTPLQTISSGGTSLLMIDSGTGDNLFAVDVRGIAPEEGRFNNLRLIVERNNLYVTGFVNRTNNVFYRFADFSHVTFPGTTAVTLSADSSYTTLQRVAGISRTGMQINRHSLTTSYLDLMSHSATSLTQSVARAMLRFVTVTAEALRFRQIQRGFRTTLDDLSGASYVMTAEDVDLTLNWGRLSSVLPDYHGQDSVRVGRISFGSINAILGSVALILNCHHHASRVAREFPKPSTPPGSSGGAPQAYLQQSGAELVRPGASVKMSCKASGYTFTSYNMHWVKQTPRQGLEWIGAIYPGNGDTSYNQKFKGKATLTVDKSSSTAYMQLSSLTSEDSAVYFCARVVYYSNSYWYFDVWGTGTTVTVSGGGGSQIVLSQSPAILSASPGEKVTMTCRASSSVSYMHWYQQKPGSSPKPWIYAPSNLASGVPARFSGSGSGTSYSLTISRVEAEDAATYYCQQWSFNPPTFGAGTKLELKS

SEQ ID NO: 123 - protein, 511 aa, Artificial Sequence
  Synthetic polypeptide
  MISC_FEATURE (242)..(242): Cys residue at this position is available to form a homodimer or heterodimer via a disulfide bond with any of SEQ ID NOS 47-175
KEFTLDFSTAKTYVDSLNVIRSAIGTPLQTISSGGTSLLMIDSGSGDNLFAVDVRGIAPEEGRFNNLRLIVERNNLYVTGFVNRTNNVFYRFADFSHVTFPGTTAVTLSADSSYTTLQRVAGISRTGMQINRHSLTTSYLDLMSHSATSLTQSVARAMLRFVTVTAEALRFRQIQRGFRTTLDDLSGASYVMTAEDVDLTLNWGRLSSVLPDYHGQDSVRVGRISFGSINAILGSVALILNCHHHASRVARGGGGSGGQAYLQQSGAELVRPGASVKMSCKASGYTFTSYNMHWVKQTPRQGLEWIGAIYPGNGDTSYNQKFKGKATLTVDKSSSTAYMQLSSLTSEDSAVYFCARVVYYSNSYWYFDVWGTGTTVTVSGGGGSGGGGSGGGGSGGGGSGGGGSQIVLSQSPAILSASPGEKVTMTCRASSSVSYMHWYQQKPGSSPKPWIYAPSNLASGVPARFSGSGSGTSYSLTISRVEAEDAATYYCQQWSFNPPTFGAGTKLELKS

SEQ ID NO: 124 - protein, 501 aa, Artificial Sequence
  Synthetic polypeptide
  MISC_FEATURE (242)..(242): Cys residue at this position is available to form a homodimer or heterodimer via a disulfide bond with any of SEQ ID NOS 47-175
KEFTLDFSTAKTYVDSLNVIRSAIGTPLQTISSGGTSLLMIDNLVPMVATVVDVRGIDPEEGRFNNLRLIVERNNLYVTGFVNRTNNVFYRFADFSHVTFPGTTAVTLSGDSSYTTLQRVAGISRTGMQINRHSLTTSYLDLMSHSGTSLTQSVARAMLRFVTVTAEALRFRQIQRGFRTTLDDLSGRSYVMTAEDVDLTLNWGRLSSVLPDYHGQDSVRVGRISFGSINAILGSVALILNCHHHASRVARGGGGSGGQAYLQQSGAELVRPGASVKMSCKASGYTFTSYNMHWVKQTPRQGLEWIGAIYPGNGDTSYNQKFKGKATLTVDKSSSTAYMQLSSLTSEDSAVYFCARVVYYSNSYWYFDVWGTGTTVTVSGSTSGSGKPGSGEGSQIVLSQSPAILSASPGEKVTMTCRASSSVSYMHWYQQKPGSSPKPWIYAPSNLASGVPARFSGSGSGTSYSLTISRVEAEDAATYYCQQWSFNPPTFGAGTKLELKS

SEQ ID NO: 125 - protein, 521 aa, Artificial Sequence
  Synthetic polypeptide
  MISC_FEATURE (242)..(242): Cys residue at this position is available to form a homodimer or heterodimer via a disulfide bond with any of SEQ ID NOS 47-175
KEFTLDFSTAKTYVDSLNVIRSAIGTPLQTISSGGTSLLMIDSGSGDNLFAVDVRGIDPEEGRFNNLRLIVERNNLYVTGFVNRTNNVFYRFADFSHVTFPGTTAVTLSGDSSYTTLQRVAGISRTGMQINRHSLTTSYLDLMSHSGTSLTQSVARAMLRFVTVTAEALRFRQIQRGFRTTLDDLSGRSYVMTAEDVDLTLNWGRLSSVLPDYHGQDSVRVGRISFGSINAILGSVALILNCHHHASRVAREFPKPSTPPGSSGGAPQVQLQQPGAELVKPGASVKMSCKTSGYTFTSYNVHWVKQTPGQGLEWIGAIYPGNGDTSFNQKFKGKATLTADKSSSTVYMQLSSLTSEDSAVYYCARSNYYGSSYVWFFDVWGAGTTVTVSSGGGGSGGGGSGGGGSGGGGSGGGGSQIVLSQSPTILSASPGEKVTMTCRASSSVSYMDWYQQKPGSSPKPWIYATSNLASGVPARFSGSGSGTSYSLTISRVEAEDAATYYCQQWISNPPTFGAGTKLELK

SEQ ID NO: 126 - protein, 511 aa, Artificial Sequence
  Synthetic polypeptide
  MISC_FEATURE (242)..(242): Cys residue at this position is available to form a homodimer or heterodimer via a disulfide bond with any of SEQ ID NOS 47-175
KEFTLDFSTAKTYVDSLNVIRSAIGTPLQTISSGGTSLLMIDSGSGDNLFAVDVRGIDPEEGRFNNLRLIVERNNLYVTGFVNRTNNVFYRFADFSHVTFPGTTAVTLSGDSSYTTLQRVAGISRTGMQINRHSLTTSYLDLMSHSGTSLTQSVARAMLRFVTVTAEALRFRQIQRGFRTTLDDLSGRSYVMTAEDVDLTLNWGRLSSVLPDYHGQDSVRVGRISFGSINAILGSVALILNCHHHASRVAREFPKPSTPPGSSGGAPQVQLQQPGAELVKPGASVKMSCKTSGYTFTSYNVHWVKQTPGQGLEWIGAIYPGNGDTSFNQKFKGKATLTADKSSSTVYMQLSSLTSEDSAVYYCARSNYYGSSYVWFFDVWGAGTTVTVSSGSTSGSGKPGSGEGSQIVLSQSPTILSASPGEKVTMTCRASSSVSYMDWYQQKPGSSPKPWIYATSNLASGVPARFSGSGSGTSYSLTISRVEAEDAATYYCQQWISNPPTFGAGTKLELK

SEQ ID NO: 127 - protein, 501 aa, Artificial Sequence
  Synthetic polypeptide
  MISC_FEATURE (242)..(242): Cys residue at this position is available to form a homodimer or heterodimer via a disulfide bond with any of SEQ ID NOS 47-175
KEFTLDFSTAKTYVDSLNVIRSAIGTPLQTISSGGTSLLMIDSGSGDNLFAVDVRGIDPEEGRFNNLRLIVERNNLYVTGFVNRTNNVFYRFADFSHVTFPGTTAVTLSGDSSYTTLQRVAGISRTGMQINRHSLTTSYLDLMSHSGTSLTQSVARAMLRFVTVTAEALRFRQIQRGFRTTLDDLSGRSYVMTAEDVDLTLNWGRLSSVLPDYHGQDSVRVGRISFGSINAILGSVALILNCHHHASRVAREFPKPSTPPGSSGGAPQVQLQQPGAELVKPGASVKMSCKTSGYTFTSYNVHWVKQTPGQGLEWIGAIYPGNGDTSFNQKFKGKATLTADKSSSTVYMQLSSLTSEDSAVYYCARSNYYGSSYVWFFDVWGAGTTVTVSSGGGGSQIVLSQSPTILSASPGEKVTMTCRASSSVSYMDWYQQKPGSSPKPWIYATSNLASGVPARFSGSGSGTSYSLTISRVEAEDAATYYCQQWISNPPTFGAGTKLELK

SEQ ID NO: 128 - protein, 512 aa, Artificial Sequence
  Synthetic polypeptide
  MISC_FEATURE (242)..(242): Cys residue at this position is available to form a homodimer or heterodimer via a disulfide bond with any of SEQ ID NOS 47-175
KEFTLDFSTAKTYVDSLNVIRSAIGTPLQTISSGGTSLLMIDSGSGDNLFAVDVRGIDPEEGRFNNLRLIVERNNLYVTGFVNRTNNVFYRFADFSHVTFPGTTAVTLSGDSSYTTLQRVAGISRTGMQINRHSLTTSYLDLMSHSGTSLTQSVARAMLRFVTVTAEALRFRQIQRGFRTTLDDLSGRSYVMTAEDVDLTLNWGRLSSVLPDYHGQDSVRVGRISFGSINAILGSVALILNCHHHASRVARGGGGSGGQVQLQQPGAELVKPGASVKMSCKTSGYTFTSYNVHWVKQTPGQGLEWIGAIYPGNGDTSFNQKFKGKATLTADKSSSTVYMQLSSLTSEDSAVYYCARSNYYGSSYVWFFDVWGAGTTVTVSSGGGGSGGGGSGGGGSGGGGSGGGGSQIVLSQSPTILSASPGEKVTMTCRASSSVSYMDWYQQKPGSSPKPWIYATSNLASGVPARFSGSGSGTSYSLTISRVEAEDAATYYCQQWISNPPTFGAGTKLELK

SEQ ID NO: 129 - protein, 502 aa, Artificial Sequence
  Synthetic polypeptide
  MISC_FEATURE (242)..(242): Cys residue at this position is available to form a homodimer or heterodimer via a disulfide bond with any of SEQ ID NOS 47-175
KEFTLDFSTAKTYVDSLNVIRSAIGTPLQTISSGGTSLLMIDSGSGDNLFAVDVRGIDPEEGRFNNLRLIVERNNLYVTGFVNRTNNVFYRFADFSHVTFPGTTAVTLSGDSSYTTLQRVAGISRTGMQINRHSLTTSYLDLMSHSGTSLTQSVARAMLRFVTVTAEALRFRQIQRGFRTTLDDLSGRSYVMTAEDVDLTLNWGRLSSVLPDYHGQDSVRVGRISFGSINAILGSVALILNCHHHASRVARGGGGSGGQVQLQQPGAELVKPGASVKMSCKTSGYTFTSYNVHWVKQTPGQGLEWIGAIYPGNGDTSFNQKFKGKATLTADKSSSTVYMQLSSLTSEDSAVYYCARSNYYGSSYVWFFDVWGAGTTVTVSSGSTSGSGKPGSGEGSQIVLSQSPTILSASPGEKVTMTCRASSSVSYMDWYQQKPGSSPKPWIYATSNLASGVPARFSGSGSGTSYSLTISRVEAEDAATYYCQQWISNPPTFGAGTKLELK

SEQ ID NO: 130 - protein, 492 aa, Artificial Sequence
  Synthetic polypeptide
  MISC_FEATURE (242)..(242): Cys residue at this position is available to form a homodimer or heterodimer via a disulfide bond with any of SEQ ID NOS 47-175
KEFTLDFSTAKTYVDSLNVIRSAIGTPLQTISSGGTSLLMIDSGTGDNLFAVDVRGIDPEEGRFNNLRLIVERNNLYVTGFVNRTNNVFYRFADFSHVTFPGTTAVTLSGDSSYTTLQRVAGISRTGMQINRHSLTTSYLDLMSHSGTSLTQSVARAMLRFVTVTAEALRFRQIQRGFRTTLDDLSGRSYVMTAEDVDLTLNWGRLSSVLPDYHGQDSVRVGRISFGSINAILGSVALILNCHHHASRVARGGGGSGGQVQLQQPGAELVKPGASVKMSCKTSGYTFTSYNVHWVKQTPGQGLEWIGAIYPGNGDTSFNQKFKGKATLTADKSSSTVYMQLSSLTSEDSAVYYCARSNYYGSSYVWFFDVWGAGTTVTVSSGGGGSQIVLSQSPTILSASPGEKVTMTCRASSSVSYMDWYQQKPGSSPKPWIYATSNLASGVPARFSGSGSGTSYSLTISRVEAEDAATYYCQQWISNPPTFGAGTKLELK

SEQ ID NO: 131 - protein, 517 aa, Artificial Sequence
  Synthetic polypeptide
  MISC_FEATURE (242)..(242): Cys residue at this position is available to form a homodimer or heterodimer via a disulfide bond with any of SEQ ID NOS 47-175
KEFTLDFSTAKTYVDSLNVIRSAIGTPLQTISSGGTSLLMIDSGSGDNLFAVDVRGIAPEEGRFNNLRLIVERNNLYVTGFVNRTNNVFYRFADFSHVTFPGTTAVTLSADSSYTTLQRVAGISRTGMQINRHSLTTSYLDLMSHSATSLTQSVARAMLRFVTVTAEALRFRQIQRGFRTTLDDLSGASYVMTAEDVDLTLNWGRLSSVLPDYHGQDSVRVGRISFGSINAILGSVALILNCHHHASEFPKPSTPPGSSGGAPQVQLQQPGAELVKPGASVKMSCKTSGYTFTSYNVHWVKQTPGQGLEWIGAIYPGNGDTSFNQKFKGKATLTADKSSSTVYMQLSSLTSEDSAVYYCARSNYYGSSYVWFFDVWGAGTTVTVSSGGGGSGGGGSGGGGSGGGGSGGGGSQIVLSQSPTILSASPGEKVTMTCRASSSVSYMDWYQQKPGSSPKPWIYATSNLASGVPARFSGSGSGTSYSLTISRVEAEDAATYYCQQWISNPPTFGAGTKLELK

SEQ ID NO: 132 - protein, 511 aa, Artificial Sequence
  Synthetic polypeptide
  MISC_FEATURE (242)..(242): Cys residue at this position is available to form a homodimer or heterodimer via a disulfide bond with any of SEQ ID NOS 47-175
KEFTLDFSTAKTYVDSLNVIRSAIGTPLQTISSGGTSLLMIDNLVPMVATVVDVRGIDPEEGRFNNLRLIVERNNLYVTGFVNRTNNVFYRFADFSHVTFPGTTAVTLSGDSSYTTLQRVAGISRTGMQINRHSLTTSYLDLMSHSGTSLTQSVARAMLRFVTVTAEALRFRQIQRGFRTTLDDLSGRSYVMTAEDVDLTLNWGRLSSVLPDYHGQDSVRVGRISFGSINAILGSVALILNCHHHASRVAREFPKPSTPPGSSGGAPQVQLQQPGAELVKPGASVKMSCKTSGYTFTSYNVHWVKQTPGQGLEWIGAIYPGNGDTSFNQKFKGKATLTADKSSSTVYMQLSSLTSEDSAVYYCARSNYYGSSYVWFFDVWGAGTTVTVSSGSTSGSGKPGSGEGSQIVLSQSPTILSASPGEKVTMTCRASSSVSYMDWYQQKPGSSPKPWIYATSNLASGVPARFSGSGSGTSYSLTISRVEAEDAATYYCQQWISNPPTFGAGTKLELK

SEQ ID NO: 133 - protein, 524 aa, Artificial Sequence
  Synthetic polypeptide
  MISC_FEATURE (242)..(242): Cys residue at this position is available to form a homodimer or heterodimer via a disulfide bond with any of SEQ ID NOS 47-175
KEFTLDFSTAKTYVDSLNVIRSAIGTPLQTISSGGTSLLMIDSGSGDNLFAVDVRGIDPEEGRFNNLRLIVERNNLYVTGFVNRTNNVFYRFADFSHVTFPGTTAVTLSGDSSYTTLQRVAGISRTGMQINRHSLTTSYLDLMSHSGTSLTQSVARAMLRFVTVTAEALRFRQIQRGFRTTLDDLSGRSYVMTAEDVDLTLNWGRLSSVLPDYHGQDSVRVGRISFGSINAILGSVALILNCHHHASRVAREFPKPSTPPGSSGGAPQVQLQQPGAELVKPGASVKMSCKTSGYTFTSYNVHWVKQTPGQGLEWIGAIYPGNGDTSFNQKFKGKATLTADKSSSTVYMQLSSLTSEDSAVYYCARSNYYGSSYVWFFDVWGAGTTVTVSSGGGGSGGGGSGGGGSGGGGSGGGGSQIVLSQSPTILSASPGEKVTMTCRASSSVSYMDWYQQKPGSSPKPWIYATSNLASGVPARFSGSGSGTSYSLTISRVEAEDAATYYCQQWISNPPTFGAGTKLELKDEL

SEQ ID NO: 134 - protein, 514 aa, Artificial Sequence
  Synthetic polypeptide
  MISC_FEATURE (242)..(242): Cys residue at this position is available to form a homodimer or heterodimer via a disulfide bond with any of SEQ ID NOS 47-175
KEFTLDFSTAKTYVDSLNVIRSAIGTPLQTISSGGTSLLMIDSGSGDNLFAVDVRGIDPEEGRFNNLRLIVERNNLYVTGFVNRTNNVFYRFADFSHVTFPGTTAVTLSGDSSYTTLQRVAGISRTGMQINRHSLTTSYLDLMSHSGTSLTQSVARAMLRFVTVTAEALRFRQIQRGFRTTLDDLSGRSYVMTAEDVDLTLNWGRLSSVLPDYHGQDSVRVGRISFGSINAILGSVALILNCHHHASRVAREFPKPSTPPGSSGGAPQVQLQQPGAELVKPGASVKMSCKTSGYTFTSYNVHWVKQTPGQGLEWIGAIYPGNGDTSFNQKFKGKATLTADKSSSTVYMQLSSLTSEDSAVYYCARSNYYGSSYVWFFDVWGAGTTVTVSSGSTSGSGKPGSGEGSQIVLSQSPTILSASPGEKVTMTCRASSSVSYMDWYQQKPGSSPKPWIYATSNLASGVPARFSGSGSGTSYSLTISRVEAEDAATYYCQQWISNPPTFGAGTKLELKDEL

SEQ ID NO: 135 - protein, 504 aa, Artificial Sequence
  Synthetic polypeptide
  MISC_FEATURE (242)..(242): Cys residue at this position is available to form a homodimer or heterodimer via a disulfide bond with any of SEQ ID NOS 47-175
KEFTLDFSTAKTYVDSLNVIRSAIGTPLQTISSGGTSLLMIDSGSGDNLFAVDVRGIDPEEGRFNNLRLIVERNNLYVTGFVNRTNNVFYRFADFSHVTFPGTTAVTLSGDSSYTTLQRVAGISRTGMQINRHSLTTSYLDLMSHSGTSLTQSVARAMLRFVTVTAEALRFRQIQRGFRTTLDDLSGRSYVMTAEDVDLTLNWGRLSSVLPDYHGQDSVRVGRISFGSINAILGSVALILNCHHHASRVAREFPKPSTPPGSSGGAPQVQLQQPGAELVKPGASVKMSCKTSGYTFTSYNVHWVKQTPGQGLEWIGAIYPGNGDTSFNQKFKGKATLTADKSSSTVYMQLSSLTSEDSAVYYCARSNYYGSSYVWFFDVWGAGTTVTVSSGGGGSQIVLSQSPTILSASPGEKVTMTCRASSSVSYMDWYQQKPGSSPKPWIYATSNLASGVPARFSGSGSGTSYSLTISRVEAEDAATYYCQQWISNPPTFGAGTKLELKDEL

SEQ ID NO: 136 - protein, 515 aa, Artificial Sequence
  Synthetic polypeptide
  MISC_FEATURE (242)..(242): Cys residue at this position is available to form a homodimer or heterodimer via a disulfide bond with any of SEQ ID NOS 47-175
KEFTLDFSTAKTYVDSLNVIRSAIGTPLQTISSGGTSLLMIDSGSGDNLFAVDVRGIDPEEGRFNNLRLIVERNNLYVTGFVNRTNNVFYRFADFSHVTFPGTTAVTLSGDSSYTTLQRVAGISRTGMQINRHSLTTSYLDLMSHSGTSLTQSVARAMLRFVTVTAEALRFRQIQRGFRTTLDDLSGRSYVMTAEDVDLTLNWGRLSSVLPDYHGQDSVRVGRISFGSINAILGSVALILNCHHHASRVARGGGGSGGQVQLQQPGAELVKPGASVKMSCKTSGYTFTSYNVHWVKQTPGQGLEWIGAIYPGNGDTSFNQKFKGKATLTADKSSSTVYMQLSSLTSEDSAVYYCARSNYYGSSYVWFFDVWGAGTTVTVSSGGGGSGGGGSGGGGSGGGGSGGGGSQIVLSQSPTILSASPGEKVTMTCRASSSVSYMDWYQQKPGSSPKPWIYATSNLASGVPARFSGSGSGTSYSLTISRVEAEDAATYYCQQWISNPPTFGAGTKLELKDEL

SEQ ID NO: 137 - protein, 505 aa, Artificial Sequence
  Synthetic polypeptide
  MISC_FEATURE (242)..(242): Cys residue at this position is available to form a homodimer or heterodimer via a disulfide bond with any of SEQ ID NOS 47-175
KEFTLDFSTAKTYVDSLNVIRSAIGTPLQTISSGGTSLLMIDSGSGDNLFAVDVRGIDPEEGRFNNLRLIVERNNLYVTGFVNRTNNVFYRFADFSHVTFPGTTAVTLSGDSSYTTLQRVAGISRTGMQINRHSLTTSYLDLMSHSGTSLTQSVARAMLRFVTVTAEALRFRQIQRGFRTTLDDLSGRSYVMTAEDVDLTLNWGRLSSVLPDYHGQDSVRVGRISFGSINAILGSVALILNCHHHASRVARGGGGSGGQVQLQQPGAELVKPGASVKMSCKTSGYTFTSYNVHWVKQTPGQGLEWIGAIYPGNGDTSFNQKFKGKATLTADKSSSTVYMQLSSLTSEDSAVYYCARSNYYGSSYVWFFDVWGAGTTVTVSSGSTSGSGKPGSGEGSQIVLSQSPTILSASPGEKVTMTCRASSSVSYMDWYQQKPGSSPKPWIYATSNLASGVPARFSGSGSGTSYSLTISRVEAEDAATYYCQQWISNPPTFGAGTKLELKDEL

SEQ ID NO: 138 - protein, 495 aa, Artificial Sequence
  Synthetic polypeptide
  MISC_FEATURE (242)..(242): Cys residue at this position is available to form a homodimer or heterodimer via a disulfide bond with any of SEQ ID NOS 47-175
KEFTLDFSTAKTYVDSLNVIRSAIGTPLQTISSGGTSLLMIDSGTGDNLFAVDVRGIDPEEGRFNNLRLIVERNNLYVTGFVNRTNNVFYRFADFSHVTFPGTTAVTLSGDSSYTTLQRVAGISRTGMQINRHSLTTSYLDLMSHSGTSLTQSVARAMLRFVTVTAEALRFRQIQRGFRTTLDDLSGRSYVMTAEDVDLTLNWGRLSSVLPDYHGQDSVRVGRISFGSINAILGSVALILNCHHHASRVARGGGGSGGQVQLQQPGAELVKPGASVKMSCKTSGYTFTSYNVHWVKQTPGQGLEWIGAIYPGNGDTSFNQKFKGKATLTADKSSSTVYMQLSSLTSEDSAVYYCARSNYYGSSYVWFFDVWGAGTTVTVSSGGGGSQIVLSQSPTILSASPGEKVTMTCRASSSVSYMDWYQQKPGSSPKPWIYATSNLASGVPARFSGSGSGTSYSLTISRVEAEDAATYYCQQWISNPPTFGAGTKLELKDEL

SEQ ID NO: 139 - protein, 520 aa, Artificial Sequence
  Synthetic polypeptide
  MISC_FEATURE (242)..(242): Cys residue at this position is available to form a homodimer or heterodimer via a disulfide bond with any of SEQ ID NOS 47-175
KEFTLDFSTAKTYVDSLNVIRSAIGTPLQTISSGGTSLLMIDSGSGDNLFAVDVRGIAPEEGRFNNLRLIVERNNLYVTGFVNRTNNVFYRFADFSHVTFPGTTAVTLSADSSYTTLQRVAGISRTGMQINRHSLTTSYLDLMSHSATSLTQSVARAMLRFVTVTAEALRFRQIQRGFRTTLDDLSGASYVMTAEDVDLTLNWGRLSSVLPDYHGQDSVRVGRISFGSINAILGSVALILNCHHHASEFPKPSTPPGSSGGAPQVQLQQPGAELVKPGASVKMSCKTSGYTFTSYNVHWVKQTPGQGLEWIGAIYPGNGDTSFNQKFKGKATLTADKSSSTVYMQLSSLTSEDSAVYYCARSNYYGSSYVWFFDVWGAGTTVTVSSGGGGSGGGGSGGGGSGGGGSGGGGSQIVLSQSPTILSASPGEKVTMTCRASSSVSYMDWYQQKPGSSPKPWIYATSNLASGVPARFSGSGSGTSYSLTISRVEAEDAATYYCQQWISNPPTFGAGTKLELKDEL

SEQ ID NO: 140 - protein, 514 aa, Artificial Sequence
  Synthetic polypeptide
  MISC_FEATURE (242)..(242): Cys residue at this position is available to form a homodimer or heterodimer via a disulfide bond with any of SEQ ID NOS 47-175
KEFTLDFSTAKTYVDSLNVIRSAIGTPLQTISSGGTSLLMIDNLVPMVATVVDVRGIDPEEGRFNNLRLIVERNNLYVTGFVNRTNNVFYRFADFSHVTFPGTTAVTLSGDSSYTTLQRVAGISRTGMQINRHSLTTSYLDLMSHSGTSLTQSVARAMLRFVTVTAEALRFRQIQRGFRTTLDDLSGRSYVMTAEDVDLTLNWGRLSSVLPDYHGQDSVRVGRISFGSINAILGSVALILNCHHHASRVAREFPKPSTPPGSSGGAPQVQLQQPGAELVKPGASVKMSCKTSGYTFTSYNVHWVKQTPGQGLEWIGAIYPGNGDTSFNQKFKGKATLTADKSSSTVYMQLSSLTSEDSAVYYCARSNYYGSSYVWFFDVWGAGTTVTVSSGSTSGSGKPGSGEGSQIVLSQSPTILSASPGEKVTMTCRASSSVSYMDWYQQKPGSSPKPWIYATSNLASGVPARFSGSGSGTSYSLTISRVEAEDAATYYCQQWISNPPTFGAGTKLELKDEL

SEQ ID NO: 141 - protein, 513 aa, Artificial Sequence
  Synthetic polypeptide
  MISC_FEATURE (242)..(242): Cys residue at this position is available to form a homodimer or heterodimer via a disulfide bond with any of SEQ ID NOS 47-175
KEFTLDFSTAKTYVDSLNVIRSAIGTPLQTISSGGTSLLMIDSGSGDNLFAVDVRGIDPEEGRFNNLRLIVERNNLYVTGFVNRTNNVFYRFADFSHVTFPGTTAVTLSGDSSYTTLQRVAGISRTGMQINRHSLTTSYLDLMSHSGTSLTQSVARAMLRFVTVTAEALRFRQIQRGFRTTLDDLSGRSYVMTAEDVDLTLNWGRLSSVLPDYHGQDSVRVGRISFGSINAILGSVALILNCHHHASRVAREFPKPSTPPGSSGGAPQVQLVQSGAEVKKPGSSVKVSCKASGYAFSYSWINWVRQAPGQGLEWMGRIFPGDGDTDYNGKFKGRVTITADKSTSTAYMELSSLRSEDTAVYYCARNVFDGYWLVYWGQGTLVTVSSGSTSGSGKPGSGEGSDIVMTQTPLSLPVTPGEPASISCRSSKSLLHSNGITYLYWYLQKPGQSPQLLIYQMSNLVSGVPDRFSGSGSGTDFTLKISRVEAEDVGVYYCAQNLELPYTFGGGTKVEIK

SEQ ID NO: 142 - protein, 494 aa, Artificial Sequence
  Synthetic polypeptide
  MISC_FEATURE (242)..(242): Cys residue at this position is available to form a homodimer or heterodimer via a disulfide bond with any of SEQ ID NOS 47-175
KEFTLDFSTAKTYVDSLNVIRSAIGTPLQTISSGGTSLLMIDSGSGDNLFAVDVRGIDPEEGRFNNLRLIVERNNLYVTGFVNRTNNVFYRFADFSHVTFPGTTAVTLSGDSSYTTLQRVAGISRTGMQINRHSLTTSYLDLMSHSGTSLTQSVARAMLRFVTVTAEALRFRQIQRGFRTTLDDLSGRSYVMTAEDVDLTLNWGRLSSVLPDYHGQDSVRVGRISFGSINAILGSVALILNCHHHASRVARGGGGSGGQVQLVQSGAEVKKPGSSVKVSCKASGYAFSYSWINWVRQAPGQGLEWMGRIFPGDGDTDYNGKFKGRVTITADKSTSTAYMELSSLRSEDTAVYYCARNVFDGYWLVYWGQGTLVTVSSGGGGSDIVMTQTPLSLPVTPGEPASISCRSSKSLLHSNGITYLYWYLQKPGQSPQLLIYQMSNLVSGVPDRFSGSGSGTDFTLKISRVEAEDVGVYYCAQNLELPYTFGGGTKVEIK

SEQ ID NO: 143 - protein, 523 aa, Artificial Sequence
  Synthetic polypeptide
  MISC_FEATURE (242)..(242): Cys residue at this position is available to form a homodimer or heterodimer via a disulfide bond with any of SEQ ID NOS 47-175
KEFTLDFSTAKTYVDSLNVIRSAIGTPLQTISSGGTSLLMIDSGTGDNLFAVDVRGIDPEEGRFNNLRLIVERNNLYVTGFVNRTNNVFYRFADFSHVTFPGTTAVTLSGDSSYTTLQRVAGISRTGMQINRHSLTTSYLDLMSHSGTSLTQSVARAMLRFVTVTAEALRFRQIQRGFRTTLDDLSGRSYVMTAEDVDLTLNWGRLSSVLPDYHGQDSVRVGRISFGSINAILGSVALILNCHHHASRVAREFPKPSTPPGSSGGAPQVQLVQSGAEVKKPGSSVKVSCKASGYAFSYSWINWVRQAPGQGLEWMGRIFPGDGDTDYNGKFKGRVTITADKSTSTAYMELSSLRSEDTAVYYCARNVFDGYWLVYWGQGTLVTVSSGGGGSGGGGSGGGGSGGGGSGGGGSDIVMTQTPLSLPVTPGEPASISCRSSKSLLHSNGITYLYWYLQKPGQSPQLLIYQMSNLVSGVPDRFSGSGSGTDFTLKISRVEAEDVGVYYCAQNLELPYTFGGGTKVEIK

SEQ ID NO: 144 - protein, 503 aa, Artificial Sequence
  Synthetic polypeptide
  MISC_FEATURE (242)..(242): Cys residue at this position is available to form a homodimer or heterodimer via a disulfide bond with any of SEQ ID NOS 47-175
KEFTLDFSTAKTYVDSLNVIRSAIGTPLQTISSGGTSLLMIDSGSGDNLFAVDVRGIAPEEGRFNNLRLIVERNNLYVTGFVNRTNNVFYRFADFSHVTFPGTTAVTLSADSSYTTLQRVAGISRTGMQINRHSLTTSYLDLMSHSATSLTQSVARAMLRFVTVTAEALRFRQIQRGFRTTLDDLSGASYVMTAEDVDLTLNWGRLSSVLPDYHGQDSVRVGRISFGSINAILGSVALILNCHHHASRVAREFPKPSTPPGSSGGAPQVQLVQSGAEVKKPGSSVKVSCKASGYAFSYSWINWVRQAPGQGLEWMGRIFPGDGDTDYNGKFKGRVTITADKSTSTAYMELSSLRSEDTAVYYCARNVFDGYWLVYWGQGTLVTVSSGGGGSDIVMTQTPLSLPVTPGEPASISCRSSKSLLHSNGITYLYWYLQKPGQSPQLLIYQMSNLVSGVPDRFSGSGSGTDFTLKISRVEAEDVGVYYCAQNLELPYTFGGGTKVEIK

SEQ ID NO: 145 - protein, 513 aa, Artificial Sequence
  Synthetic polypeptide
  MISC_FEATURE (242)..(242): Cys residue at this position is available to form a homodimer or heterodimer via a disulfide bond with any of SEQ ID NOS 47-175
KEFTLDFSTAKTYVDSLNVIRSAIGTPLQTISSGGTSLLMIDNLVPMVATVVDVRGIDPEEGRFNNLRLIVERNNLYVTGFVNRTNNVFYRFADFSHVTFPGTTAVTLSGDSSYTTLQRVAGISRTGMQINRHSLTTSYLDLMSHSGTSLTQSVARAMLRFVTVTAEALRFRQIQRGFRTTLDDLSGRSYVMTAEDVDLTLNWGRLSSVLPDYHGQDSVRVGRISFGSINAILGSVALILNCHHHASRVAREFPKPSTPPGSSGGAPQVQLVQSGAEVKKPGSSVKVSCKASGYAFSYSWINWVRQAPGQGLEWMGRIFPGDGDTDYNGKFKGRVTITADKSTSTAYMELSSLRSEDTAVYYCARNVFDGYWLVYWGQGTLVTVSSGSTSGSGKPGSGEGSDIVMTQTPLSLPVTPGEPASISCRSSKSLLHSNGITYLYWYLQKPGQSPQLLIYQMSNLVSGVPDRFSGSGSGTDFTLKISRVEAEDVGVYYCAQNLELPYTFGGGTKVEIK

SEQ ID NO: 146 - protein, 513 aa, Artificial Sequence
  Synthetic polypeptide
  MISC_FEATURE (242)..(242): Cys residue at this position is available to form a homodimer or heterodimer via a disulfide bond with any of SEQ ID NOS 47-175
KEFTLDFSTAKTYVDSLNVIRSAIGTPLQTISSGGTSLLMIDSGSGDNLFAVDVRGIDPEEGRFNNLRLIVERNNLYVTGFVNRTNNVFYRFADFSHVTFPGTTAVTLSGDSSYTTLQRVAGISRTGMQINRHSLTTSYLDLMSHSGTSLTQSVARAMLRFVTVTAEALRFRQIQRGFRTTLDDLSGRSYVMTAEDVDLTLNWGRLSSVLPDYHGQDSVRVGRISFGSINAILGSVALILNCHHHASRVAREFPKPSTPPGSSGGAPDIVMTQTPLSLPVTPGEPASISCRSSKSLLHSNGITYLYWYLQKPGQSPQLLIYQMSNLVSGVPDRFSGSGSGTDFTLKISRVEAEDVGVYYCAQNLELPYTFGGGTKVEIKGSTSGSGKPGSGEGSQVQLVQSGAEVKKPGSSVKVSCKASGYAFSYSWINWVRQAPGQGLEWMGRIFPGDGDTDYNGKFKGRVTITADKSTSTAYMELSSLRSEDTAVYYCARNVFDGYWLVYWGQGTLVTVSS

SEQ ID NO: 147 - protein, 514 aa, Artificial Sequence
  Synthetic polypeptide
  MISC_FEATURE (242)..(242): Cys residue at this position is available to form a homodimer or heterodimer via a disulfide bond with any of SEQ ID NOS 47-175
KEFTLDFSTAKTYVDSLNVIRSAIGTPLQTISSGGTSLLMIDSGSGDNLFAVDVRGIDPEEGRFNNLRLIVERNNLYVTGFVNRTNNVFYRFADFSHVTFPGTTAVTLSGDSSYTTLQRVAGISRTGMQINRHSLTTSYLDLMSHSGTSLTQSVARAMLRFVTVTAEALRFRQIQRGFRTTLDDLSGRSYVMTAEDVDLTLNWGRLSSVLPDYHGQDSVRVGRISFGSINAILGSVALILNCHHHASRVARGGGGSGGDIVMTQTPLSLPVTPGEPASISCRSSKSLLHSNGITYLYWYLQKPGQSPQLLIYQMSNLVSGVPDRFSGSGSGTDFTLKISRVEAEDVGVYYCAQNLELPYTFGGGTKVEIKGGGGSGGGGSGGGGSGGGGSGGGGSQVQLVQSGAEVKKPGSSVKVSCKASGYAFSYSWINWVRQAPGQGLEWMGRIFPGDGDTDYNGKFKGRVTITADKSTSTAYMELSSLRSEDTAVYYCARNVFDGYWLVYWGQGTLVTVSS

SEQ ID NO: 148 - protein, 494 aa, Artificial Sequence
  Synthetic polypeptide
  MISC_FEATURE (242)..(242): Cys residue at this position is available to form a homodimer or heterodimer via a disulfide bond with any of SEQ ID NOS 47-175
KEFTLDFSTAKTYVDSLNVIRSAIGTPLQTISSGGTSLLMIDSGTGDNLFAVDVRGIDPEEGRFNNLRLIVERNNLYVTGFVNRTNNVFYRFADFSHVTFPGTTAVTLSGDSSYTTLQRVAGISRTGMQINRHSLTTSYLDLMSHSGTSLTQSVARAMLRFVTVTAEALRFRQIQRGFRTTLDDLSGRSYVMTAEDVDLTLNWGRLSSVLPDYHGQDSVRVGRISFGSINAILGSVALILNCHHHASRVARGGGGSGGDIVMTQTPLSLPVTPGEPASISCRSSKSLLHSNGITYLYWYLQKPGQSPQLLIYQMSNLVSGVPDRFSGSGSGTDFTLKISRVEAEDVGVYYCAQNLELPYTFGGGTKVEIKGGGGSQVQLVQSGAEVKKPGSSVKVSCKASGYAFSYSWINWVRQAPGQGLEWMGRIFPGDGDTDYNGKFKGRVTITADKSTSTAYMELSSLRSEDTAVYYCARNVFDGYWLVYWGQGTLVTVSS

SEQ ID NO: 149 - protein, 509 aa, Artificial Sequence
  Synthetic polypeptide
  MISC_FEATURE (242)..(242): Cys residue at this position is available to form a homodimer or heterodimer via a disulfide bond with any of SEQ ID NOS 47-175
KEFTLDFSTAKTYVDSLNVIRSAIGTPLQTISSGGTSLLMIDSGSGDNLFAVDVRGIAPEEGRFNNLRLIVERNNLYVTGFVNRTNNVFYRFADFSHVTFPGTTAVTLSADSSYTTLQRVAGISRTGMQINRHSLTTSYLDLMSHSATSLTQSVARAMLRFVTVTAEALRFRQIQRGFRTTLDDLSGASYVMTAEDVDLTLNWGRLSSVLPDYHGQDSVRVGRISFGSINAILGSVALILNCHHHASEFPKPSTPPGSSGGAPDIVMTQTPLSLPVTPGEPASISCRSSKSLLHSNGITYLYWYLQKPGQSPQLLIYQMSNLVSGVPDRFSGSGSGTDFTLKISRVEAEDVGVYYCAQNLELPYTFGGGTKVEIKGSTSGSGKPGSGEGSQVQLVQSGAEVKKPGSSVKVSCKASGYAFSYSWINWVRQAPGQGLEWMGRIFPGDGDTDYNGKFKGRVTITADKSTSTAYMELSSLRSEDTAVYYCARNVFDGYWLVYWGQGTLVTVSS

SEQ ID NO: 150 - protein, 513 aa, Artificial Sequence
  Synthetic polypeptide
  MISC_FEATURE (242)..(242): Cys residue at this position is available to form a homodimer or heterodimer via a disulfide bond with any of SEQ ID NOS 47-175
KEFTLDFSTAKTYVDSLNVIRSAIGTPLQTISSGGTSLLMIDNLVPMVATVVDVRGIDPEEGRFNNLRLIVERNNLYVTGFVNRTNNVFYRFADFSHVTFPGTTAVTLSGDSSYTTLQRVAGISRTGMQINRHSLTTSYLDLMSHSGTSLTQSVARAMLRFVTVTAEALRFRQIQRGFRTTLDDLSGRSYVMTAEDVDLTLNWGRLSSVLPDYHGQDSVRVGRISFGSINAILGSVALILNCHHHASRVAREFPKPSTPPGSSGGAPDIVMTQTPLSLPVTPGEPASISCRSSKSLLHSNGITYLYWYLQKPGQSPQLLIYQMSNLVSGVPDRFSGSGSGTDFTLKISRVEAEDVGVYYCAQNLELPYTFGGGTKVEIKGSTSGSGKPGSGEGSQVQLVQSGAEVKKPGSSVKVSCKASGYAFSYSWINWVRQAPGQGLEWMGRIFPGDGDTDYNGKFKGRVTITADKSTSTAYMELSSLRSEDTAVYYCARNVFDGYWLVYWGQGTLVTVSS

SEQ ID NO: 151 - protein, 509 aa, Artificial Sequence
  Synthetic polypeptide
  MISC_FEATURE (242)..(242): Cys residue at this position is available to form a homodimer or heterodimer via a disulfide bond with any of SEQ ID NOS 47-175
KEFTLDFSTAKTYVDSLNVIRSAIGTPLQTISSGGTSLLMIDSGSGDNLFAVDVRGIDPEEGRFNNLRLIVERNNLYVTGFVNRTNNVFYRFADFSHVTFPGTTAVTLSGDSSYTTLQRVAGISRTGMQINRHSLTTSYLDLMSHSGTSLTQSVARAMLRFVTVTAEALRFRQIQRGFRTTLDDLSGRSYVMTAEDVDLTLNWGRLSSVLPDYHGQDSVRVGRISFGSINAILGSVALILNCHHHASEFPKPSTPPGSSGGAPDIVMTQTPLSLPVTPGEPASISCRSSKSLLHSNGITYLYWYLQKPGQSPQLLIYQMSNLVSGVPDRFSGSGSGTDFTLKISRVEAEDVGVYYCAQNLELPYTFGGGTKVEIKGSTSGSGKPGSGEGSQVQLVQSGAEVKKPGSSVKVSCKASGYAFSYSWINWVRQAPGQGLEWMGRIFPGDGDTDYNGKFKGRVTITADKSTSTAYMELSSLRSEDTAVYYCARNVFDGYWLVYWGQGTLVTVSS

SEQ ID NO: 152 - protein, 510 aa, Artificial Sequence
  Synthetic polypeptide
  MISC_FEATURE (242)..(242): Cys residue at this position is available to form a homodimer or heterodimer via a disulfide bond with any of SEQ ID NOS 47-175
KEFTLDFSTAKTYVDSLNVIRSAIGTPLQTISSGGTSLLMIDSGSGDNLFAVDVRGIDPEEGRFNNLRLIVERNNLYVTGFVNRTNNVFYRFADFSHVTFPGTTAVTLSGDSSYTTLQRVAGISRTGMQINRHSLTTSYLDLMSHSGTSLTQSVARAMLRFVTVTAEALRFRQIQRGFRTTLDDLSGRSYVMTAEDVDLTLNWGRLSSVLPDYHGQDSVRVGRISFGSINAILGSVALILNCHHHASRVAREFPKPSTPPGSSGGAPQIVLSQSPAILSASPGEKVTMTCRASSSVSYMHWYQQKPGSSPKPWIYAPSNLASGVPARFSGSGSGTSYSLTISRVEAEDAATYYCQQWSFNPPTFGAGTKLELKSGSTSGSGKPGSGEGSQAYLQQSGAELVRPGASVKMSCKASGYTFTSYNMHWVKQTPRQGLEWIGAIYPGNGDTSYNQKFKGKATLTVDKSSSTAYMQLSSLTSEDSAVYFCARVVYYSNSYWYFDVWGTGTTVTVS

SEQ ID NO: 153 - protein, 500 aa, Artificial Sequence
  Synthetic polypeptide
  MISC_FEATURE (242)..(242): Cys residue at this position is available to form a homodimer or heterodimer via a disulfide bond with any of SEQ ID NOS 47-175
KEFTLDFSTAKTYVDSLNVIRSAIGTPLQTISSGGTSLLMIDSGSGDNLFAVDVRGIDPEEGRFNNLRLIVERNNLYVTGFVNRTNNVFYRFADFSHVTFPGTTAVTLSGDSSYTTLQRVAGISRTGMQINRHSLTTSYLDLMSHSGTSLTQSVARAMLRFVTVTAEALRFRQIQRGFRTTLDDLSGRSYVMTAEDVDLTLNWGRLSSVLPDYHGQDSVRVGRISFGSINAILGSVALILNCHHHASRVAREFPKPSTPPGSSGGAPQIVLSQSPAILSASPGEKVTMTCRASSSVSYMHWYQQKPGSSPKPWIYAPSNLASGVPARFSGSGSGTSYSLTISRVEAEDAATYYCQQWSFNPPTFGAGTKLELKSGGGGSQAYLQQSGAELVRPGASVKMSCKASGYTFTSYNMHWVKQTPRQGLEWIGAIYPGNGDTSYNQKFKGKATLTVDKSSSTAYMQLSSLTSEDSAVYFCARVVYYSNSYWYFDVWGTGTTVTVS

SEQ ID NO: 154 - protein, 510 aa, Artificial Sequence
  Synthetic polypeptide
  MISC_FEATURE (242)..(242): Cys residue at this position is available to form a homodimer or heterodimer via a disulfide bond with any of SEQ ID NOS 47-175
KEFTLDFSTAKTYVDSLNVIRSAIGTPLQTISSGGTSLLMIDSGTGDNLFAVDVRGIDPEEGRFNNLRLIVERNNLYVTGFVNRTNNVFYRFADFSHVTFPGTTAVTLSGDSSYTTLQRVAGISRTGMQINRHSLTTSYLDLMSHSGTSLTQSVARAMLRFVTVTAEALRFRQIQRGFRTTLDDLSGRSYVMTAEDVDLTLNWGRLSSVLPDYHGQDSVRVGRISFGSINAILGSVALILNCHHHASRVAREFPKPSTPPGSSGGAPQIVLSQSPAILSASPGEKVTMTCRASSSVSYMHWYQQKPGSSPKPWIYAPSNLASGVPARFSGSGSGTSYSLTISRVEAEDAATYYCQQWSFNPPTFGAGTKLELKSGSTSGSGKPGSGEGSQAYLQQSGAELVRPGASVKMSCKASGYTFTSYNMHWVKQTPRQGLEWIGAIYPGNGDTSYNQKFKGKATLTVDKSSSTAYMQLSSLTSEDSAVYFCARVVYYSNSYWYFDVWGTGTTVTVS

SEQ ID NO: 155 - protein, 510 aa, Artificial Sequence
  Synthetic polypeptide
  MISC_FEATURE (242)..(242): Cys residue at this position is available to form a homodimer or heterodimer via a disulfide bond with any of SEQ ID NOS 47-175
KEFTLDFSTAKTYVDSLNVIRSAIGTPLQTISSGGTSLLMIDSGSGDNLFAVDVRGIAPEEGRFNNLRLIVERNNLYVTGFVNRTNNVFYRFADFSHVTFPGTTAVTLSADSSYTTLQRVAGISRTGMQINRHSLTTSYLDLMSHSATSLTQSVARAMLRFVTVTAEALRFRQIQRGFRTTLDDLSGASYVMTAEDVDLTLNWGRLSSVLPDYHGQDSVRVGRISFGSINAILGSVALILNCHHHASRVAREFPKPSTPPGSSGGAPQIVLSQSPAILSASPGEKVTMTCRASSSVSYMHWYQQKPGSSPKPWIYAPSNLASGVPARFSGSGSGTSYSLTISRVEAEDAATYYCQQWSFNPPTFGAGTKLELKSGSTSGSGKPGSGEGSQAYLQQSGAELVRPGASVKMSCKASGYTFTSYNMHWVKQTPRQGLEWIGAIYPGNGDTSYNQKFKGKATLTVDKSSSTAYMQLSSLTSEDSAVYFCARVVYYSNSYWYFDVWGTGTTVTVS

SEQ ID NO: 156 - protein, 511 aa, Artificial Sequence
  Synthetic polypeptide
  MISC_FEATURE (242)..(242): Cys residue at this position is available to form a homodimer or heterodimer via a disulfide bond with any of SEQ ID NOS 47-175
KEFTLDFSTAKTYVDSLNVIRSAIGTPLQTISSGGTSLLMIDNLVPMVATVVDVRGIDPEEGRFNNLRLIVERNNLYVTGFVNRTNNVFYRFADFSHVTFPGTTAVTLSGDSSYTTLQRVAGISRTGMQINRHSLTTSYLDLMSHSGTSLTQSVARAMLRFVTVTAEALRFRQIQRGFRTTLDDLSGRSYVMTAEDVDLTLNWGRLSSVLPDYHGQDSVRVGRISFGSINAILGSVALILNCHHHASRVARGGGGSGGQIVLSQSPAILSASPGEKVTMTCRASSSVSYMHWYQQKPGSSPKPWIYAPSNLASGVPARFSGSGSGTSYSLTISRVEAEDAATYYCQQWSFNPPTFGAGTKLELKSGGGGSGGGGSGGGGSGGGGSGGGGSQAYLQQSGAELVRPGASVKMSCKASGYTFTSYNMHWVKQTPRQGLEWIGAIYPGNGDTSYNQKFKGKATLTVDKSSSTAYMQLSSLTSEDSAVYFCARVVYYSNSYWYFDVWGTGTTVTVS

SEQ ID NO: 157 - protein, 510 aa, Artificial Sequence
  Synthetic polypeptide
  MISC_FEATURE (242)..(242): Cys residue at this position is available to form a homodimer or heterodimer via a disulfide bond with any of SEQ ID NOS 47-175
KEFTLDFSTAKTYVDSLNVIRSAIGTPLQTISSGGTSLLMIDSGSGDNLFAVDVRGIDPEEGRFNNLRLIVERNNLYVTGFVNRTNNVFYRFADFSHVTFPGTTAVTLSGDSSYTTLQRVAGISRTGMQINRHSLTTSYLDLMSHSGTSLTQSVARAMLRFVTVTAEALRFRQIQRGFRTTLDDLSGRSYVMTAEDVDLTLNWGRLSSVLPDYHGQDSVRVGRISFGSINAILGSVALILNCHHHASAVAAEFPKPSTPPGSSGGAPQIVLSQSPAILSASPGEKVTMTCRASSSVSYMHWYQQKPGSSPKPWIYAPSNLASGVPARFSGSGSGTSYSLTISRVEAEDAATYYCQQWSFNPPTFGAGTKLELKSGSTSGSGKPGSGEGSQAYLQQSGAELVRPGASVKMSCKASGYTFTSYNMHWVKQTPRQGLEWIGAIYPGNGDTSYNQKFKGKATLTVDKSSSTAYMQLSSLTSEDSAVYFCARVVYYSNSYWYFDVWGTGTTVTVS

SEQ ID NO: 158 - protein, 511 aa, Artificial Sequence
  Synthetic polypeptide
  MISC_FEATURE (242)..(242): Cys residue at this position is available to form a homodimer or heterodimer via a disulfide bond with any of SEQ ID NOS 47-175
KEFTLDFSTAKTYVDSLNVIRSAIGTPLQTISSGGTSLLMIDSGSGDNLFAVDVRGIDPEEGRFNNLRLIVERNNLYVTGFVNRTNNVFYRFADFSHVTFPGTTAVTLSGDSSYTTLQRVAGISRTGMQINRHSLTTSYLDLMSHSGTSLTQSVARAMLRFVTVTAEALRFRQIQRGFRTTLDDLSGRSYVMTAEDVDLTLNWGRLSSVLPDYHGQDSVRVGRISFGSINAILGSVALILNCHHHASRVAREFPKPSTPPGSSGGAPEIVLTQSPATLSLSPGERATLSCRASQSVSSYLAWYQQKPGQAPRLLIYDASNRATGIPARFSGSGSGTDFTLTISSLEPEDFAVYYCQQRSNWPITFGQGTRLEIKGSTSGSGKPGSGEGSEVQLVESGGGLVQPGRSLRLSCAASGFTFNDYAMHWVRQAPGKGLEWVSTISWNSGSIGYADSVKGRFTISRDNAKKSLYLQMNSLRAEDTALYYCAKDIQYGNYYYGMDVWGQGTTVTVSS

SEQ ID NO: 159 - protein, 512 aa, Artificial Sequence
  Synthetic polypeptide
  MISC_FEATURE (242)..(242): Cys residue at this position is available to form a homodimer or heterodimer via a disulfide bond with any of SEQ ID NOS 47-175
KEFTLDFSTAKTYVDSLNVIRSAIGTPLQTISSGGTSLLMIDSGSGDNLFAVDVRGIDPEEGRFNNLRLIVERNNLYVTGFVNRTNNVFYRFADFSHVTFPGTTAVTLSGDSSYTTLQRVAGISRTGMQINRHSLTTSYLDLMSHSGTSLTQSVARAMLRFVTVTAEALRFRQIQRGFRTTLDDLSGRSYVMTAEDVDLTLNWGRLSSVLPDYHGQDSVRVGRISFGSINAILGSVALILNCHHHASRVARGGGGSGGEIVLTQSPATLSLSPGERATLSCRASQSVSSYLAWYQQKPGQAPRLLIYDASNRATGIPARFSGSGSGTDFTLTISSLEPEDFAVYYCQQRSNWPITFGQGTRLEIKGGGGSGGGGSGGGGSGGGGSGGGGSEVQLVESGGGLVQPGRSLRLSCAASGFTFNDYAMHWVRQAPGKGLEWVSTISWNSGSIGYADSVKGRFTISRDNAKKSLYLQMNSLRAEDTALYYCAKDIQYGNYYYGMDVWGQGTTVTVSS

SEQ ID NO: 160 - protein, 512 aa, Artificial Sequence
  Synthetic polypeptide
  MISC_FEATURE (242)..(242): Cys residue at this position is available to form a homodimer or heterodimer via a disulfide bond with any of SEQ ID NOS 47-175
KEFTLDFSTAKTYVDSLNVIRSAIGTPLQTISSGGTSLLMIDSGTGDNLFAVDVRGIDPEEGRFNNLRLIVERNNLYVTGFVNRTNNVFYRFADFSHVTFPGTTAVTLSGDSSYTTLQRVAGISRTGMQINRHSLTTSYLDLMSHSGTSLTQSVARAMLRFVTVTAEALRFRQIQRGFRTTLDDLSGRSYVMTAEDVDLTLNWGRLSSVLPDYHGQDSVRVGRISFGSINAILGSVALILNCHHHASRVARGGGGSGGEIVLTQSPATLSLSPGERATLSCRASQSVSSYLAWYQQKPGQAPRLLIYDASNRATGIPARFSGSGSGTDFTLTISSLEPEDFAVYYCQQRSNWPITFGQGTRLEIKGGGGSGGGGSGGGGSGGGGSGGGGSEVQLVESGGGLVQPGRSLRLSCAASGFTFNDYAMHWVRQAPGKGLEWVSTISWNSGSIGYADSVKGRFTISRDNAKKSLYLQMNSLRAEDTALYYCAKDIQYGNYYYGMDVWGQGTTVTVSS

SEQ ID NO: 161 - protein, 498 aa, Artificial Sequence
  Synthetic polypeptide
  MISC_FEATURE (242)..(242): Cys residue at this position is available to form a homodimer or heterodimer via a disulfide bond with any of SEQ ID NOS 47-175
KEFTLDFSTAKTYVDSLNVIRSAIGTPLQTISSGGTSLLMIDSGSGDNLFAVDVRGIAPEEGRFNNLRLIVERNNLYVTGFVNRTNNVFYRFADFSHVTFPGTTAVTLSADSSYTTLQRVAGISRTGMQINRHSLTTSYLDLMSHSATSLTQSVARAMLRFVTVTAEALRFRQIQRGFRTTLDDLSGASYVMTAEDVDLTLNWGRLSSVLPDYHGQDSVRVGRISFGSINAILGSVALILNCHHHASGGGGSGGEIVLTQSPATLSLSPGERATLSCRASQSVSSYLAWYQQKPGQAPRLLIYDASNRATGIPARFSGSGSGTDFTLTISSLEPEDFAVYYCQQRSNWPITFGQGTRLEIKGSTSGSGKPGSGEGSEVQLVESGGGLVQPGRSLRLSCAASGFTFNDYAMHWVRQAPGKGLEWVSTISWNSGSIGYADSVKGRFTISRDNAKKSLYLQMNSLRAEDTALYYCAKDIQYGNYYYGMDVWGQGTTVTVSS

SEQ ID NO: 162 - protein, 492 aa, Artificial Sequence
  Synthetic polypeptide
  MISC_FEATURE (242)..(242): Cys residue at this position is available to form a homodimer or heterodimer via a disulfide bond with any of SEQ ID NOS 47-175
KEFTLDFSTAKTYVDSLNVIRSAIGTPLQTISSGGTSLLMIDNLVPMVATVVDVRGIDPEEGRFNNLRLIVERNNLYVTGFVNRTNNVFYRFADFSHVTFPGTTAVTLSGDSSYTTLQRVAGISRTGMQINRHSLTTSYLDLMSHSGTSLTQSVARAMLRFVTVTAEALRFRQIQRGFRTTLDDLSGRSYVMTAEDVDLTLNWGRLSSVLPDYHGQDSVRVGRISFGSINAILGSVALILNCHHHASRVARGGGGSGGEIVLTQSPATLSLSPGERATLSCRASQSVSSYLAWYQQKPGQAPRLLIYDASNRATGIPARFSGSGSGTDFTLTISSLEPEDFAVYYCQQRSNWPITFGQGTRLEIKGGGGSEVQLVESGGGLVQPGRSLRLSCAASGFTFNDYAMHWVRQAPGKGLEWVSTISWNSGSIGYADSVKGRFTISRDNAKKSLYLQMNSLRAEDTALYYCAKDIQYGNYYYGMDVWGQGTTVTVSS

SEQ ID NO: 163 - protein, 507 aa, Artificial Sequence
  Synthetic polypeptide
  MISC_FEATURE (242)..(242): Cys residue at this position is available to form a homodimer or heterodimer via a disulfide bond with any of SEQ ID NOS 47-175
KEFTLDFSTAKTYVDSLNVIRSAIGTPLQTISSGGTSLLMIDSGSGDNLFAVDVRGIDPEEGRFNNLRLIVERNNLYVTGFVNRTNNVFYRFADFSHVTFPGTTAVTLSGDSSYTTLQRVAGISRTGMQINRHSLTTSYLDLMSHSGTSLTQSVARAMLRFVTVTAEALRFRQIQRGFRTTLDDLSGRSYVMTAEDVDLTLNWGRLSSVLPDYHGQDSVRVGRISFGSINAILGSVALILNCHHHASEFPKPSTPPGSSGGAPEIVLTQSPATLSLSPGERATLSCRASQSVSSYLAWYQQKPGQAPRLLIYDASNRATGIPARFSGSGSGTDFTLTISSLEPEDFAVYYCQQRSNWPITFGQGTRLEIKGSTSGSGKPGSGEGSEVQLVESGGGLVQPGRSLRLSCAASGFTFNDYAMHWVRQAPGKGLEWVSTISWNSGSIGYADSVKGRFTISRDNAKKSLYLQMNSLRAEDTALYYCAKDIQYGNYYYGMDVWGQGTTVTVSS

SEQ ID NO: 164 - protein, 512 aa, Artificial Sequence
  Synthetic polypeptide
  MISC_FEATURE (242)..(242): Cys residue at this position is available to form a homodimer or heterodimer via a disulfide bond with any of SEQ ID NOS 47-175
KEFTLDFSTAKTYVDSLNVIRSAIGTPLQTISSGGTSLLMIDSGSGDNLFAVDVRGIDPEEGRFNNLRLIVERNNLYVTGFVNRTNNVFYRFADFSHVTFPGTTAVTLSGDSSYTTLQRVAGISRTGMQINRHSLTTSYLDLMSHSGTSLTQSVARAMLRFVTVTAEALRFRQIQRGFRTTLDDLSGRSYVMTAEDVDLTLNWGRLSSVLPDYHGQDSVRVGRISFGSINAILGSVALILNCHHHASRVAREFPKPSTPPGSSGGAPQVQLQQPGAELVKPGASVKMSCKASGYTFTSYNMHWVKQTPGRGLEWIGAIYPGNGDTSYNQKFKGKATLTADKSSSTAYMQLSSLTSEDSAVYYCARSTYYGGDWYFNVWGAGTTVTVSAGSTSGSGKPGSGEGSTKGQIVLSQSPAILSASPGEKVTMTCRASSSVSYIHWFQQKPGSSPKPWIYATSNLASGVPVRFSGSGSGTSYSLTISRVEAEDAATYYCQQWTSNPPTFGGGTKLEIK

SEQ ID NO: 165 - protein, 503 aa, Artificial Sequence
  Synthetic polypeptide
  MISC_FEATURE (242)..(242): Cys residue at this position is available to form a homodimer or heterodimer via a disulfide bond with any of SEQ ID NOS 47-175
KEFTLDFSTAKTYVDSLNVIRSAIGTPLQTISSGGTSLLMIDSGSGDNLFAVDVRGIDPEEGRFNNLRLIVERNNLYVTGFVNRTNNVFYRFADFSHVTFPGTTAVTLSGDSSYTTLQRVAGISRTGMQINRHSLTTSYLDLMSHSGTSLTQSVARAMLRFVTVTAEALRFRQIQRGFRTTLDDLSGRSYVMTAEDVDLTLNWGRLSSVLPDYHGQDSVRVGRISFGSINAILGSVALILNCHHHASRVARGGGGSGGQVQLQQPGAELVKPGASVKMSCKASGYTFTSYNMHWVKQTPGRGLEWIGAIYPGNGDTSYNQKFKGKATLTADKSSSTAYMQLSSLTSEDSAVYYCARSTYYGGDWYFNVWGAGTTVTVSAGSTSGSGKPGSGEGSTKGQIVLSQSPAILSASPGEKVTMTCRASSSVSYIHWFQQKPGSSPKPWIYATSNLASGVPVRFSGSGSGTSYSLTISRVEAEDAATYYCQQWTSNPPTFGGGTKLEIK

SEQ ID NO: 166 - protein, 503 aa, Artificial Sequence
  Synthetic polypeptide
  MISC_FEATURE (242)..(242): Cys residue at this position is available to form a homodimer or heterodimer via a disulfide bond with any of SEQ ID NOS 47-175
KEFTLDFSTAKTYVDSLNVIRSAIGTPLQTISSGGTSLLMIDSGTGDNLFAVDVRGIDPEEGRFNNLRLIVERNNLYVTGFVNRTNNVFYRFADFSHVTFPGTTAVTLSGDSSYTTLQRVAGISRTGMQINRHSLTTSYLDLMSHSGTSLTQSVARAMLRFVTVTAEALRFRQIQRGFRTTLDDLSGRSYVMTAEDVDLTLNWGRLSSVLPDYHGQDSVRVGRISFGSINAILGSVALILNCHHHASRVARGGGGSGGQVQLQQPGAELVKPGASVKMSCKASGYTFTSYNMHWVKQTPGRGLEWIGAIYPGNGDTSYNQKFKGKATLTADKSSSTAYMQLSSLTSEDSAVYYCARSTYYGGDWYFNVWGAGTTVTVSAGSTSGSGKPGSGEGSTKGQIVLSQSPAILSASPGEKVTMTCRASSSVSYIHWFQQKPGSSPKPWIYATSNLASGVPVRFSGSGSGTSYSLTISRVEAEDAATYYCQQWTSNPPTFGGGTKLEIK

SEQ ID NO: 167 - protein, 493 aa, Artificial Sequence
  Synthetic polypeptide
  MISC_FEATURE (242)..(242): Cys residue at this position is available to form a homodimer or heterodimer via a disulfide bond with any of SEQ ID NOS 47-175
KEFTLDFSTAKTYVDSLNVIRSAIGTPLQTISSGGTSLLMIDSGSGDNLFAVDVRGIAPEEGRFNNLRLIVERNNLYVTGFVNRTNNVFYRFADFSHVTFPGTTAVTLSADSSYTTLQRVAGISRTGMQINRHSLTTSYLDLMSHSATSLTQSVARAMLRFVTVTAEALRFRQIQRGFRTTLDDLSGASYVMTAEDVDLTLNWGRLSSVLPDYHGQDSVRVGRISFGSINAILGSVALILNCHHHASRVARGGGGSGGQVQLQQPGAELVKPGASVKMSCKASGYTFTSYNMHWVKQTPGRGLEWIGAIYPGNGDTSYNQKFKGKATLTADKSSSTAYMQLSSLTSEDSAVYYCARSTYYGGDWYFNVWGAGTTVTVSAGGGGSTKGQIVLSQSPAILSASPGEKVTMTCRASSSVSYIHWFQQKPGSSPKPWIYATSNLASGVPVRFSGSGSGTSYSLTISRVEAEDAATYYCQQWTSNPPTFGGGTKLEIK

SEQ ID NO: 168 - protein, 525 aa, Artificial Sequence
  Synthetic polypeptide
  MISC_FEATURE (242)..(242): Cys residue at this position is available to form a homodimer or heterodimer via a disulfide bond with any of SEQ ID NOS 47-175
KEFTLDFSTAKTYVDSLNVIRSAIGTPLQTISSGGTSLLMIDNLVPMVATVVDVRGIDPEEGRFNNLRLIVERNNLYVTGFVNRTNNVFYRFADFSHVTFPGTTAVTLSGDSSYTTLQRVAGISRTGMQINRHSLTTSYLDLMSHSGTSLTQSVARAMLRFVTVTAEALRFRQIQRGFRTTLDDLSGRSYVMTAEDVDLTLNWGRLSSVLPDYHGQDSVRVGRISFGSINAILGSVALILNCHHHASRVAREFPKPSTPPGSSGGAPQVQLQQPGAELVKPGASVKMSCKASGYTFTSYNMHWVKQTPGRGLEWIGAIYPGNGDTSYNQKFKGKATLTADKSSSTAYMQLSSLTSEDSAVYYCARSTYYGGDWYFNVWGAGTTVTVSAGGGGSGGGGSGGGGSGGGGSGGGGSTKGQIVLSQSPAILSASPGEKVTMTCRASSSVSYIHWFQQKPGSSPKPWIYATSNLASGVPVRFSGSGSGTSYSLTISRVEAEDAATYYCQQWTSNPPTFGGGTKLEIKDEL

SEQ ID NO: 169 - protein, 493 aa, Artificial Sequence
  Synthetic polypeptide
  MISC_FEATURE (242)..(242): Cys residue at this position is available to form a homodimer or heterodimer via a disulfide bond with any of SEQ ID NOS 47-175
KEFTLDFSTAKTYVDSLNVIRSAIGTPLQTISSGGTSLLMIDSGSGDNLFAVDVRGIDPEEGRFNNLRLIVERNNLYVTGFVNRTNNVFYRFADFSHVTFPGTTAVTLSGDSSYTTLQRVAGISRTGMQINRHSLTTSYLDLMSHSGTSLTQSVARAMLRFVTVTAEALRFRQIQRGFRTTLDDLSGRSYVMTAEDVDLTLNWGRLSSVLPDYHGQDSVRVGRISFGSINAILGSVALILNCHHHASAVAAGGGGSGGQVQLQQPGAELVKPGASVKMSCKASGYTFTSYNMHWVKQTPGRGLEWIGAIYPGNGDTSYNQKFKGKATLTADKSSSTAYMQLSSLTSEDSAVYYCARSTYYGGDWYFNVWGAGTTVTVSAGGGGSTKGQIVLSQSPAILSASPGEKVTMTCRASSSVSYIHWFQQKPGSSPKPWIYATSNLASGVPVRFSGSGSGTSYSLTISRVEAEDAATYYCQQWTSNPPTFGGGTKLEIK

SEQ ID NO: 170 - protein, 509 aa, Artificial Sequence
  Synthetic polypeptide
  MISC_FEATURE (242)..(242): Cys residue at this position is available to form a homodimer or heterodimer via a disulfide bond with any of SEQ ID NOS 47-175
KEFTLDFSTAKTYVDSLNVIRSAIGTPLQTISSGGTSLLMIDSGSGDNLFAVDVRGIDPEEGRFNNLRLIVERNNLYVTGFVNRTNNVFYRFADFSHVTFPGTTAVTLSGDSSYTTLQRVAGISRTGMQINRHSLTTSYLDLMSHSGTSLTQSVARAMLRFVTVTAEALRFRQIQRGFRTTLDDLSGRSYVMTAEDVDLTLNWGRLSSVLPDYHGQDSVRVGRISFGSINAILGSVALILNCHHHASRVAREFPKPSTPPGSSGGAPQVQLVQSGAELVKPGASVKMSCKASGYTFTSYNMHWVKQTPGQGLEWIGAIYPGNGDTSYNQKFKGKATLTADKSSSTAYMQLSSLTSEDSAVYYCARAQLRPNYWYFDVWGAGTTVTVSSGSTSGSGKPGSGEGSDIVLSQSPAILSASPGEKVTMTCRASSSVSYMHWYQQKPGSSPKPWIYATSNLASGVPARFSGSGSGTSYSLTISRVEAEDAATYYCQQWISNPPTFGAGTKLELK

SEQ ID NO: 171 - protein, 499 aa, Artificial Sequence
  Synthetic polypeptide
  MISC_FEATURE (242)..(242): Cys residue at this position is available to form a homodimer or heterodimer via a disulfide bond with any of SEQ ID NOS 47-175
KEFTLDFSTAKTYVDSLNVIRSAIGTPLQTISSGGTSLLMIDNLVPMVATVVDVRGIDPEEGRFNNLRLIVERNNLYVTGFVNRTNNVFYRFADFSHVTFPGTTAVTLSGDSSYTTLQRVAGISRTGMQINRHSLTTSYLDLMSHSGTSLTQSVARAMLRFVTVTAEALRFRQIQRGFRTTLDDLSGRSYVMTAEDVDLTLNWGRLSSVLPDYHGQDSVRVGRISFGSINAILGSVALILNCHHHASRVAREFPKPSTPPGSSGGAPQVQLVQSGAELVKPGASVKMSCKASGYTFTSYNMHWVKQTPGQGLEWIGAIYPGNGDTSYNQKFKGKATLTADKSSSTAYMQLSSLTSEDSAVYYCARAQLRPNYWYFDVWGAGTTVTVSSGGGGSDIVLSQSPAILSASPGEKVTMTCRASSSVSYMHWYQQKPGSSPKPWIYATSNLASGVPARFSGSGSGTSYSLTISRVEAEDAATYYCQQWISNPPTFGAGTKLELK

SEQ ID NO: 172 - protein, 496 aa, Artificial Sequence
  Synthetic polypeptide
  MISC_FEATURE (242)..(242): Cys residue at this position is available to form a homodimer or heterodimer via a disulfide bond with any of SEQ ID NOS 47-175
KEFTLDFSTAKTYVDSLNVIRSAIGTPLQTISSGGTSLLMIDSGSGDNLFAVDVRGIDPEEGRFNNLRLIVERNNLYVTGFVNRTNNVFYRFADFSHVTFPGTTAVTLSGDSSYTTLQRVAGISRTGMQINRHSLTTSYLDLMSHSGTSLTQSVARAMLRFVTVTAEALRFRQIQRGFRTTLDDLSGRSYVMTAEDVDLTLNWGRLSSVLPDYHGQDSVRVGRISFGSINAILGSVALILNCHHHASGGGGSGGQVQLVQSGAELVKPGASVKMSCKASGYTFTSYNMHWVKQTPGQGLEWIGAIYPGNGDTSYNQKFKGKATLTADKSSSTAYMQLSSLTSEDSAVYYCARAQLRPNYWYFDVWGAGTTVTVSSGSTSGSGKPGSGEGSDIVLSQSPAILSASPGEKVTMTCRASSSVSYMHWYQQKPGSSPKPWIYATSNLASGVPARFSGSGSGTSYSLTISRVEAEDAATYYCQQWISNPPTFGAGTKLELK

SEQ ID NO: 173 - protein, 512 aa, Artificial Sequence; identical to SEQ ID NO: 164
  Synthetic polypeptide
  MISC_FEATURE (242)..(242): Cys residue at this position is available to form a homodimer or heterodimer via a disulfide bond with any of SEQ ID NOS 47-175

SEQ ID NO: 174 - protein, 502 aa, Artificial Sequence
  Synthetic polypeptide
  MISC_FEATURE (242)..(242): Cys residue at this position is available to form a homodimer or heterodimer via a disulfide bond with any of SEQ ID NOS 47-175
KEFTLDFSTAKTYVDSLNVIRSAIGTPLQTISSGGTSLLMIDNLVPMVATVVDVRGIDPEEGRFNNLRLIVERNNLYVTGFVNRTNNVFYRFADFSHVTFPGTTAVTLSGDSSYTTLQRVAGISRTGMQINRHSLTTSYLDLMSHSGTSLTQSVARAMLRFVTVTAEALRFRQIQRGFRTTLDDLSGRSYVMTAEDVDLTLNWGRLSSVLPDYHGQDSVRVGRISFGSINAILGSVALILNCHHHASRVAREFPKPSTPPGSSGGAPQVQLQQPGAELVKPGASVKMSCKASGYTFTSYNMHWVKQTPGRGLEWIGAIYPGNGDTSYNQKFKGKATLTADKSSSTAYMQLSSLTSEDSAVYYCARSTYYGGDWYFNVWGAGTTVTVSAGGGGSTKGQIVLSQSPAILSASPGEKVTMTCRASSSVSYIHWFQQKPGSSPKPWIYATSNLASGVPVRFSGSGSGTSYSLTISRVEAEDAATYYCQQWTSNPPTFGGGTKLEIK

SEQ ID NO: 175 - protein, 488 aa, Artificial Sequence
  Synthetic polypeptide
  MISC_FEATURE (242)..(242): Cys residue at this position is available to form a homodimer or heterodimer via a disulfide bond with any of SEQ ID NOS 47-175
KEFTLDFSTAKTYVDSLNVIRSAIGTPLQTISSGGTSLLMIDSGSGDNLFAVDVRGIDPEEGRFNNLRLIVERNNLYVTGFVNRTNNVFYRFADFSHVTFPGTTAVTLSGDSSYTTLQRVAGISRTGMQINRHSLTTSYLDLMSHSGTSLTQSVARAMLRFVTVTAEALRFRQIQRGFRTTLDDLSGRSYVMTAEDVDLTLNWGRLSSVLPDYHGQDSVRVGRISFGSINAILGSVALILNCHHHASAVAAGGGGSGGQVQLQQPGAELVKPGASVKMSCKASGYTFTSYNMHWVKQTPGRGLEWIGAIYPGNGDTSYNQKFKGKATLTADKSSSTAYMQLSSLTSEDSAVYYCARSTYYGGDWYFNVWGAGTTVTVSAGGGGSGGGGSGGGGSGGGGSGGGGSTKGQIVLSQSPAILSASPGEKVTMTCRASSSVSYIHWFQQKPGSSPKPWIYATSNLASGVPVRFSGSGSGTSYSLTISRVEAED

SEQ ID NO: 176 - protein, 519 aa, Artificial Sequence
  Synthetic polypeptide
QVQLVQSGAELVKPGASVKMSCKASGYTFTSYNMHWVKQTPGQGLEWIGAIYPGNGDTSYNQKFKGKATLTADKSSSTAYMQLSSLTSEDSAVYYCARAQLRPNYWYFDVWGAGTTVTVSSGGGGSGGGGSGGGGSGGGGSGGGGSDIVLSQSPAILSASPGEKVTMTCRASSSVSYMHWYQQKPGSSPKPWIYATSNLASGVPARFSGSGSGTSYSLTISRVEAEDAATYYCQQWISNPPTFGAGTKLELKEFPKPSTPPGSSGGAPKEFTLDFSTAKTYVDSLNVIRSAIGTPLQTISSGGTSLLMIDSGSGDNLFAVDVRGIDPEEGRFNNLRLIVERNNLYVTGFVNRTNNVFYRFADFSHVTFPGTTAVTLSGDSSYTTLQRVAGISRTGMQINRHSLTTSYLDLMSHSGTSLTQSVARAMLRFVTVTAEALRFRQIQRGFRTTLDDLSGRSYVMTAEDVDLTLNWGRLSSVLPDYHGQDSVRVGRISFGSINAILGSVALILNSHHHASRVAR

SEQ ID NO: 177 - protein, 509 aa, Artificial Sequence
  Synthetic polypeptide
QVQLVQSGAELVKPGASVKMSCKASGYTFTSYNMHWVKQTPGQGLEWIGAIYPGNGDTSYNQKFKGKATLTADKSSSTAYMQLSSLTSEDSAVYYCARAQLRPNYWYFDVWGAGTTVTVSSGSTSGSGKPGSGEGSDIVLSQSPAILSASPGEKVTMTCRASSSVSYMHWYQQKPGSSPKPWIYATSNLASGVPARFSGSGSGTSYSLTISRVEAEDAATYYCQQWISNPPTFGAGTKLELKEFPKPSTPPGSSGGAPKEFTLDFSTAKTYVDSLNVIRSAIGTPLQTISSGGTSLLMIDSGSGDNLFAVDVRGIDPEEGRFNNLRLIVERNNLYVTGFVNRTNNVFYRFADFSHVTFPGTTAVTLSGDSSYTTLQRVAGISRTGMQINRHSLTTSYLDLMSHSGTSLTQSVARAMLRFVTVTAEALRFRQIQRGFRTTLDDLSGRSYVMTAEDVDLTLNWGRLSSVLPDYHGQDSVRVGRISFGSINAILGSVALILNSHHHASRVAR

SEQ ID NO: 178 - protein, 499 aa, Artificial Sequence
  Synthetic polypeptide
QVQLVQSGAELVKPGASVKMSCKASGYTFTSYNMHWVKQTPGQGLEWIGAIYPGNGDTSYNQKFKGKATLTADKSSSTAYMQLSSLTSEDSAVYYCARAQLRPNYWYFDVWGAGTTVTVSSGGGGSDIVLSQSPAILSASPGEKVTMTCRASSSVSYMHWYQQKPGSSPKPWIYATSNLASGVPARFSGSGSGTSYSLTISRVEAEDAATYYCQQWISNPPTFGAGTKLELKEFPKPSTPPGSSGGAPKEFTLDFSTAKTYVDSLNVIRSAIGTPLQTISSGGTSLLMIDSGTGDNLFAVDVRGIAPEEGRFNNLRLIVERNNLYVTGFVNRTNNVFYRFADFSHVTFPGTTAVTLSADSSYTTLQRVAGISRTGMQINRHSLTTSYLDLMSHSATSLTQSVARAMLRFVTVTAEALRFRQIQRGFRTTLDDLSGASYVMTAEDVDLTLNWGRLSSVLPDYHGQDSVRVGRISFGSINAILGSVALILNSHHHASRVAR

SEQ ID NO: 179 - protein, 514 aa, Artificial Sequence
  Synthetic polypeptide
QVQLVQSGAELVKPGASVKMSCKASGYTFTSYNMHWVKQTPGQGLEWIGAIYPGNGDTSYNQKFKGKATLTADKSSSTAYMQLSSLTSEDSAVYYCARAQLRPNYWYFDVWGAGTTVTVSSGGGGSGGGGSGGGGSGGGGSGGGGSDIVLSQSPAILSASPGEKVTMTCRASSSVSYMHWYQQKPGSSPKPWIYATSNLASGVPARFSGSGSGTSYSLTISRVEAEDAATYYCQQWISNPPTFGAGTKLELKGGGGSGGKEFTLDFSTAKTYVDSLNVIRSAIGTPLQTISSGGTSLLMIDSGSGDNLFAVDVRGIAPEEGRFNNLRLIVERNNLYVTGFVNRTNNVFYRFADFSHVTFPGTTAVTLSADSSYTTLQRVAGISRTGMQINRHSLTTSYLDLMSHSATSLTQSVARAMLRFVTVTAEALRFRQIQRGFRTTLDDLSGASYVMTAEDVDLTLNWGRLSSVLPDYHGQDSVRVGRISFGSINAILGSVALILNSHHHASRVARKDEL

SEQ ID NO: 180 - protein, 500 aa, Artificial Sequence
  Synthetic polypeptide
QVQLVQSGAELVKPGASVKMSCKASGYTFTSYNMHWVKQTPGQGLEWIGAIYPGNGDTSYNQKFKGKATLTADKSSSTAYMQLSSLTSEDSAVYYCARAQLRPNYWYFDVWGAGTTVTVSSGSTSGSGKPGSGEGSDIVLSQSPAILSASPGEKVTMTCRASSSVSYMHWYQQKPGSSPKPWIYATSNLASGVPARFSGSGSGTSYSLTISRVEAEDAATYYCQQWISNPPTFGAGTKLELKGGGGSGGKEFTLDFSTAKTYVDSLNVIRSAIGTPLQTISSGGTSLLMIDNLVPMVATVVDVRGIDPEEGRFNNLRLIVERNNLYVTGFVNRTNNVFYRFADFSHVTFPGTTAVTLSGDSSYTTLQRVAGISRTGMQINRHSLTTSYLDLMSHSGTSLTQSVARAMLRFVTVTAEALRFRQIQRGFRTTLDDLSGRSYVMTAEDVDLTLNWGRLSSVLPDYHGQDSVRVGRISFGSINAILGSVALILNSHHHASRVAR

SEQ ID NO: 181 - protein, 508 aa, Artificial Sequence
  Synthetic polypeptide
QVQLVQSGAELVKPGASVKMSCKASGYTFTSYNMHWVKQTPGQGLEWIGAIYPGNGDTSYNQKFKGKATLTADKSSSTAYMQLSSLTSEDSAVYYCARAQLRPNYWYFDVWGAGTTVTVSSGGGGSDIVLSQSPAILSASPGEKVTMTCRASSSVSYMHWYQQKPGSSPKPWIYATSNLASGVPARFSGSGSGTSYSLTISRVEAEDAATYYCQQWISNPPTFGAGTKLELKEFPKPSTPPGSSGGAPGILGFVFTLKEFTLDFSTAKTYVDSLNVIRSAIGTPLQTISSGGTSLLMIDSGSGDNLFAVDVRGIDPEEGRFNNLRLIVERNNLYVTGFVNRTNNVFYRFADFSHVTFPGTTAVTLSGDSSYTTLQRVAGISRTGMQINRHSLTTSYLDLMSHSGTSLTQSVARAMLRFVTVTAEALRFRQIQRGFRTTLDDLSGRSYVMTAEDVDLTLNWGRLSSVLPDYHGQDSVRVGRISFGSINAILGSVALILNSHHHASAVAA

SEQ ID NO: 182 - protein, 521 aa, Artificial Sequence
  Synthetic polypeptide
QVQLQQPGAELVKPGASVKMSCKTSGYTFTSYNVHWVKQTPGQGLEWIGAIYPGNGDTSFNQKFKGKATLTADKSSSTVYMQLSSLTSEDSAVYYCARSNYYGSSYVWFFDVWGAGTTVTVSSGGGGSGGGGSGGGGSGGGGSGGGGSQIVLSQSPTILSASPGEKVTMTCRASSSVSYMDWYQQKPGSSPKPWIYATSNLASGVPARFSGSGSGTSYSLTISRVEAEDAATYYCQQWISNPPTFGAGTKLELKEFPKPSTPPGSSGGAPKEFTLDFSTAKTYVDSLNVIRSAIGTPLQTISSGGTSLLMIDSGSGDNLFAVDVRGIDPEEGRFNNLRLIVERNNLYVTGFVNRTNNVFYRFADFSHVTFPGTTAVTLSGDSSYTTLQRVAGISRTGMQINRHSLTTSYLDLMSHSGTSLTQSVARAMLRFVTVTAEALRFRQIQRGFRTTLDDLSGRSYVMTAEDVDLTLNWGRLSSVLPDYHGQDSVRVGRISFGSINAILGSVALILNSHHHASRVAR

SEQ ID NO: 183 - protein, 512 aa, Artificial Sequence
  Synthetic polypeptide
MQVQLQQPGAELVKPGASVKMSCKTSGYTFTSYNVHWVKQTPGQGLEWIGAIYPGNGDTSFNQKFKGKATLTADKSSSTVYMQLSSLTSEDSAVYYCARSNYYGSSYVWFFDVWGAGTTVTVSSGSTSGSGKPGSGEGSQIVLSQSPTILSASPGEKVTMTCRASSSVSYMDWYQQKPGSSPKPWIYATSNLASGVPARFSGSGSGTSYSLTISRVEAEDAATYYCQQWISNPPTFGAGTKLELKEFPKPSTPPGSSGGAPKEFTLDFSTAKTYVDSLNVIRSAIGTPLQTISSGGTSLLMIDSGSGDNLFAVDVRGIDPEEGRFNNLRLIVERNNLYVTGFVNRTNNVFYRFADFSHVTFPGTTAVTLSGDSSYTTLQRVAGISRTGMQINRHSLTTSYLDLMSHSGTSLTQSVARAMLRFVTVTAEALRFRQIQRGFRTTLDDLSGRSYVMTAEDVDLTLNWGRLSSVLPDYHGQDSVRVGRISFGSINAILGSVALILNSHHHASRVAR

SEQ ID NO: 184 - protein, 511 aa, Artificial Sequence
  Synthetic polypeptide
QVQLQQPGAELVKPGASVKMSCKTSGYTFTSYNVHWVKQTPGQGLEWIGAIYPGNGDTSFNQKFKGKATLTADKSSSTVYMQLSSLTSEDSAVYYCARSNYYGSSYVWFFDVWGAGTTVTVSSGSTSGSGKPGSGEGSQIVLSQSPTILSASPGEKVTMTCRASSSVSYMDWYQQKPGSSPKPWIYATSNLASGVPARFSGSGSGTSYSLTISRVEAEDAATYYCQQWISNPPTFGAGTKLELKEFPKPSTPPGSSGGAPKEFTLDFSTAKTYVDSLNVIRSAIGTPLQTISSGGTSLLMIDSGSGDNLFAVDVRGIDPEEGRFNNLRLIVERNNLYVTGFVNRTNNVFYRFADFSHVTFPGTTAVTLSGDSSYTTLQRVAGISRTGMQINRHSLTTSYLDLMSHSGTSLTQSVARAMLRFVTVTAEALRFRQIQRGFRTTLDDLSGRSYVMTAEDVDLTLNWGRLSSVLPDYHGQDSVRVGRISFGSINAILGSVALILNSHHHASRVAR

SEQ ID NO: 185 - protein, 501 aa, Artificial Sequence
  Synthetic polypeptide
QVQLQQPGAELVKPGASVKMSCKTSGYTFTSYNVHWVKQTPGQGLEWIGAIYPGNGDTSFNQKFKGKATLTADKSSSTVYMQLSSLTSEDSAVYYCARSNYYGSSYVWFFDVWGAGTTVTVSSGGGGSQIVLSQSPTILSASPGEKVTMTCRASSSVSYMDWYQQKPGSSPKPWIYATSNLASGVPARFSGSGSGTSYSLTISRVEAEDAATYYCQQWISNPPTFGAGTKLELKEFPKPSTPPGSSGGAPKEFTLDFSTAKTYVDSLNVIRSAIGTPLQTISSGGTSLLMIDSGSGDNLFAVDVRGIDPEEGRFNNLRLIVERNNLYVTGFVNRTNNVFYRFADFSHVTFPGTTAVTLSGDSSYTTLQRVAGISRTGMQINRHSLTTSYLDLMSHSGTSLTQSVARAMLRFVTVTAEALRFRQIQRGFRTTLDDLSGRSYVMTAEDVDLTLNWGRLSSVLPDYHGQDSVRVGRISFGSINAILGSVALILNSHHHASRVAR

SEQ ID NO: 186 - protein, 512 aa, Artificial Sequence
  Synthetic polypeptide
QVQLQQPGAELVKPGASVKMSCKTSGYTFTSYNVHWVKQTPGQGLEWIGAIYPGNGDTSFNQKFKGKATLTADKSSSTVYMQLSSLTSEDSAVYYCARSNYYGSSYVWFFDVWGAGTTVTVSSGGGGSGGGGSGGGGSGGGGSGGGGSQIVLSQSPTILSASPGEKVTMTCRASSSVSYMDWYQQKPGSSPKPWIYATSNLASGVPARFSGSGSGTSYSLTISRVEAEDAATYYCQQWISNPPTFGAGTKLELKGGGGSGGKEFTLDFSTAKTYVDSLNVIRSAIGTPLQTISSGGTSLLMIDSGSGDNLFAVDVRGIDPEEGRFNNLRLIVERNNLYVTGFVNRTNNVFYRFADFSHVTFPGTTAVTLSGDSSYTTLQRVAGISRTGMQINRHSLTTSYLDLMSHSGTSLTQSVARAMLRFVTVTAEALRFRQIQRGFRTTLDDLSGRSYVMTAEDVDLTLNWGRLSSVLPDYHGQDSVRVGRISFGSINAILGSVALILNSHHHASRVAR

SEQ ID NO: 187 - protein, 502 aa, Artificial Sequence
  Synthetic polypeptide
QVQLQQPGAELVKPGASVKMSCKTSGYTFTSYNVHWVKQTPGQGLEWIGAIYPGNGDTSFNQKFKGKATLTADKSSSTVYMQLSSLTSEDSAVYYCARSNYYGSSYVWFFDVWGAGTTVTVSSGSTSGSGKPGSGEGSQIVLSQSPTILSASPGEKVTMTCRASSSVSYMDWYQQKPGSSPKPWIYATSNLASGVPARFSGSGSGTSYSLTISRVEAEDAATYYCQQWISNPPTFGAGTKLELKGGGGSGGKEFTLDFSTAKTYVDSLNVIRSAIGTPLQTISSGGTSLLMIDSGSGDNLFAVDVRGIDPEEGRFNNLRLIVERNNLYVTGFVNRTNNVFYRFADFSHVTFPGTTAVTLSGDSSYTTLQRVAGISRTGMQINRHSLTTSYLDLMSHSGTSLTQSVARAMLRFVTVTAEALRFRQIQRGFRTTLDDLSGRSYVMTAEDVDLTLNWGRLSSVLPDYHGQDSVRVGRISFGSINAILGSVALILNSHHHASRVAR

SEQ ID NO: 188 - protein, 530 aa, Artificial Sequence
  Synthetic polypeptide
QVQLQQPGAELVKPGASVKMSCKTSGYTFTSYNVHWVKQTPGQGLEWIGAIYPGNGDTSFNQKFKGKATLTADKSSSTVYMQLSSLTSEDSAVYYCARSNYYGSSYVWFFDVWGAGTTVTVSSGGGGSGGGGSGGGGSGGGGSGGGGSQIVLSQSPTILSASPGEKVTMTCRASSSVSYMDWYQQKPGSSPKPWIYATSNLASGVPARFSGSGSGTSYSLTISRVEAEDAATYYCQQWISNPPTFGAGTKLELKEFPKPSTPPGSSGGAPGILGFVFTLKEFTLDFSTAKTYVDSLNVIRSAIGTPLQTISSGGTSLLMIDSGSGDNLFAVDVRGIDPEEGRFNNLRLIVERNNLYVTGFVNRTNNVFYRFADFSHVTFPGTTAVTLSGDSSYTTLQRVAGISRTGMQINRHSLTTSYLDLMSHSGTSLTQSVARAMLRFVTVTAEALRFRQIQRGFRTTLDDLSGRSYVMTAEDVDLTLNWGRLSSVLPDYHGQDSVRVGRISFGSINAILGSVALILNSHHHASRVAR

SEQ ID NO: 189 - protein, 520 aa, Artificial Sequence
  Synthetic polypeptide
QVQLQQPGAELVKPGASVKMSCKTSGYTFTSYNVHWVKQTPGQGLEWIGAIYPGNGDTSFNQKFKGKATLTADKSSSTVYMQLSSLTSEDSAVYYCARSNYYGSSYVWFFDVWGAGTTVTVSSGSTSGSGKPGSGEGSQIVLSQSPTILSASPGEKVTMTCRASSSVSYMDWYQQKPGSSPKPWIYATSNLASGVPARFSGSGSGTSYSLTISRVEAEDAATYYCQQWISNPPTFGAGTKLELKEFPKPSTPPGSSGGAPGILGFVFTLKEFTLDFSTAKTYVDSLNVIRSAIGTPLQTISSGGTSLLMIDSGSGDNLFAVDVRGIDPEEGRFNNLRLIVERNNLYVTGFVNRTNNVFYRFADFSHVTFPGTTAVTLSGDSSYTTLQRVAGISRTGMQINRHSLTTSYLDLMSHSGTSLTQSVARAMLRFVTVTAEALRFRQIQRGFRTTLDDLSGRSYVMTAEDVDLTLNWGRLSSVLPDYHGQDSVRVGRISFGSINAILGSVALILNSHHHASRVAR

SEQ ID NO: 190 - protein, 510 aa, Artificial Sequence
  Synthetic polypeptide
QVQLQQPGAELVKPGASVKMSCKTSGYTFTSYNVHWVKQTPGQGLEWIGAIYPGNGDTSFNQKFKGKATLTADKSSSTVYMQLSSLTSEDSAVYYCARSNYYGSSYVWFFDVWGAGTTVTVSSGGGGSQIVLSQSPTILSASPGEKVTMTCRASSSVSYMDWYQQKPGSSPKPWIYATSNLASGVPARFSGSGSGTSYSLTISRVEAEDAATYYCQQWISNPPTFGAGTKLELKEFPKPSTPPGSSGGAPGILGFVFTLKEFTLDFSTAKTYVDSLNVIRSAIGTPLQTISSGGTSLLMIDSGSGDNLFAVDVRGIDPEEGRFNNLRLIVERNNLYVTGFVNRTNNVFYRFADFSHVTFPGTTAVTLSGDSSYTTLQRVAGISRTGMQINRHSLTTSYLDLMSHSGTSLTQSVARAMLRFVTVTAEALRFRQIQRGFRTTLDDLSGRSYVMTAEDVDLTLNWGRLSSVLPDYHGQDSVRVGRISFGSINAILGSVALILNSHHHASRVAR

SEQ ID NO: 191 - protein, 492 aa, Artificial Sequence
  Synthetic polypeptide
QVQLQQPGAELVKPGASVKMSCKTSGYTFTSYNVHWVKQTPGQGLEWIGAIYPGNGDTSFNQKFKGKATLTADKSSSTVYMQLSSLTSEDSAVYYCARSNYYGSSYVWFFDVWGAGTTVTVSSGGGGSQIVLSQSPTILSASPGEKVTMTCRASSSVSYMDWYQQKPGSSPKPWIYATSNLASGVPARFSGSGSGTSYSLTISRVEAEDAATYYCQQWISNPPTFGAGTKLELKGGGGSGGKEFTLDFSTAKTYVDSLNVIRSAIGTPLQTISSGGTSLLMIDSGTGDNLFAVDVRGIDPEEGRFNNLRLIVERNNLYVTGFVNRTNNVFYRFADFSHVTFPGTTAVTLSGDSSYTTLQRVAGISRTGMQINRHSLTTSYLDLMSHSGTSLTQSVARAMLRFVTVTAEALRFRQIQRGFRTTLDDLSGRSYVMTAEDVDLTLNWGRLSSVLPDYHGQDSVRVGRISFGSINAILGSVALILNSHHHASRVAR

SEQ ID NO: 192 - protein, 517 aa, Artificial Sequence
  Synthetic polypeptide
QVQLQQPGAELVKPGASVKMSCKTSGYTFTSYNVHWVKQTPGQGLEWIGAIYPGNGDTSFNQKFKGKATLTADKSSSTVYMQLSSLTSEDSAVYYCARSNYYGSSYVWFFDVWGAGTTVTVSSGGGGSGGGGSGGGGSGGGGSGGGGSQIVLSQSPTILSASPGEKVTMTCRASSSVSYMDWYQQKPGSSPKPWIYATSNLASGVPARFSGSGSGTSYSLTISRVEAEDAATYYCQQWISNPPTFGAGTKLELKEFPKPSTPPGSSGGAPKEFTLDFSTAKTYVDSLNVIRSAIGTPLQTISSGGTSLLMIDSGSGDNLFAVDVRGIAPEEGRFNNLRLIVERNNLYVTGFVNRTNNVFYRFADFSHVTFPGTTAVTLSADSSYTTLQRVAGISRTGMQINRHSLTTSYLDLMSHSATSLTQSVARAMLRFVTVTAEALRFRQIQRGFRTTLDDLSGASYVMTAEDVDLTLNWGRLSSVLPDYHGQDSVRVGRISFGSINAILGSVALILNSHHHAS

SEQ ID NO: 193 - protein, 511 aa, Artificial Sequence
  Synthetic polypeptide
QVQLQQPGAELVKPGASVKMSCKTSGYTFTSYNVHWVKQTPGQGLEWIGAIYPGNGDTSFNQKFKGKATLTADKSSSTVYMQLSSLTSEDSAVYYCARSNYYGSSYVWFFDVWGAGTTVTVSSGSTSGSGKPGSGEGSQIVLSQSPTILSASPGEKVTMTCRASSSVSYMDWYQQKPGSSPKPWIYATSNLASGVPARFSGSGSGTSYSLTISRVEAEDAATYYCQQWISNPPTFGAGTKLELKEFPKPSTPPGSSGGAPKEFTLDFSTAKTYVDSLNVIRSAIGTPLQTISSGGTSLLMIDNLVPMVATVVDVRGIDPEEGRFNNLRLIVERNNLYVTGFVNRTNNVFYRFADFSHVTFPGTTAVTLSGDSSYTTLQRVAGISRTGMQINRHSLTTSYLDLMSHSGTSLTQSVARAMLRFVTVTAEALRFRQIQRGFRTTLDDLSGRSYVMTAEDVDLTLNWGRLSSVLPDYHGQDSVRVGRISFGSINAILGSVALILNSHHHASRVAR

SEQ ID NO: 194 - protein, 526 aa, Artificial Sequence
  Synthetic polypeptide
QVQLQQPGAELVKPGASVKMSCKTSGYTFTSYNVHWVKQTPGQGLEWIGAIYPGNGDTSFNQKFKGKATLTADKSSSTVYMQLSSLTSEDSAVYYCARSNYYGSSYVWFFDVWGAGTTVTVSSGGGGSGGGGSGGGGSGGGGSGGGGSQIVLSQSPTILSASPGEKVTMTCRASSSVSYMDWYQQKPGSSPKPWIYATSNLASGVPARFSGSGSGTSYSLTISRVEAEDAATYYCQQWISNPPTFGAGTKLELKEFPKPSTPPGSSGGAPGILGFVFTLKEFTLDFSTAKTYVDSLNVIRSAIGTPLQTISSGGTSLLMIDSGSGDNLFAVDVRGIDPEEGRFNNLRLIVERNNLYVTGFVNRTNNVFYRFADFSHVTFPGTTAVTLSGDSSYTTLQRVAGISRTGMQINRHSLTTSYLDLMSHSGTSLTQSVARAMLRFVTVTAEALRFRQIQRGFRTTLDDLSGRSYVMTAEDVDLTLNWGRLSSVLPDYHGQDSVRVGRISFGSINAILGSVALILNSHHHAS

SEQ ID NO: 195 - protein, 525 aa, Artificial Sequence
  Synthetic polypeptide
QVQLQQPGAELVKPGASVKMSCKTSGYTFTSYNVHWVKQTPGQGLEWIGAIYPGNGDTSFNQKFKGKATLTADKSSSTVYMQLSSLTSEDSAVYYCARSNYYGSSYVWFFDVWGAGTTVTVSSGGGGSGGGGSGGGGSGGGGSGGGGSQIVLSQSPTILSASPGEKVTMTCRASSSVSYMDWYQQKPGSSPKPWIYATSNLASGVPARFSGSGSGTSYSLTISRVEAEDAATYYCQQWISNPPTFGAGTKLELKEFPKPSTPPGSSGGAPKEFTLDFSTAKTYVDSLNVIRSAIGTPLQTISSGGTSLLMIDSGSGDNLFAVDVRGIDPEEGRFNNLRLIVERNNLYVTGFVNRTNNVFYRFADFSHVTFPGTTAVTLSGDSSYTTLQRVAGISRTGMQINRHSLTTSYLDLMSHSGTSLTQSVARAMLRFVTVTAEALRFRQIQRGFRTTLDDLSGRSYVMTAEDVDLTLNWGRLSSVLPDYHGQDSVRVGRISFGSINAILGSVALILNSHHHASRVARKDEL

SEQ ID NO: 196 - protein, 515 aa, Artificial Sequence
  Synthetic polypeptide
QVQLQQPGAELVKPGASVKMSCKTSGYTFTSYNVHWVKQTPGQGLEWIGAIYPGNGDTSFNQKFKGKATLTADKSSSTVYMQLSSLTSEDSAVYYCARSNYYGSSYVWFFDVWGAGTTVTVSSGSTSGSGKPGSGEGSQIVLSQSPTILSASPGEKVTMTCRASSSVSYMDWYQQKPGSSPKPWIYATSNLASGVPARFSGSGSGTSYSLTISRVEAEDAATYYCQQWISNPPTFGAGTKLELKEFPKPSTPPGSSGGAPKEFTLDFSTAKTYVDSLNVIRSAIGTPLQTISSGGTSLLMIDSGSGDNLFAVDVRGIDPEEGRFNNLRLIVERNNLYVTGFVNRTNNVFYRFADFSHVTFPGTTAVTLSGDSSYTTLQRVAGISRTGMQINRHSLTTSYLDLMSHSGTSLTQSVARAMLRFVTVTAEALRFRQIQRGFRTTLDDLSGRSYVMTAEDVDLTLNWGRLSSVLPDYHGQDSVRVGRISFGSINAILGSVALILNSHHHASRVARKDEL

SEQ ID NO: 197 - protein, 505 aa, Artificial Sequence
  Synthetic polypeptide
QVQLQQPGAELVKPGASVKMSCKTSGYTFTSYNVHWVKQTPGQGLEWIGAIYPGNGDTSFNQKFKGKATLTADKSSSTVYMQLSSLTSEDSAVYYCARSNYYGSSYVWFFDVWGAGTTVTVSSGGGGSQIVLSQSPTILSASPGEKVTMTCRASSSVSYMDWYQQKPGSSPKPWIYATSNLASGVPARFSGSGSGTSYSLTISRVEAEDAATYYCQQWISNPPTFGAGTKLELKEFPKPSTPPGSSGGAPKEFTLDFSTAKTYVDSLNVIRSAIGTPLQTISSGGTSLLMIDSGSGDNLFAVDVRGIDPEEGRFNNLRLIVERNNLYVTGFVNRTNNVFYRFADFSHVTFPGTTAVTLSGDSSYTTLQRVAGISRTGMQINRHSLTTSYLDLMSHSGTSLTQSVARAMLRFVTVTAEALRFRQIQRGFRTTLDDLSGRSYVMTAEDVDLTLNWGRLSSVLPDYHGQDSVRVGRISFGSINAILGSVALILNSHHHASRVARKDEL

SEQ ID NO: 198 - protein, 516 aa, Artificial Sequence
  Synthetic polypeptide
QVQLQQPGAELVKPGASVKMSCKTSGYTFTSYNVHWVKQTPGQGLEWIGAIYPGNGDTSFNQKFKGKATLTADKSSSTVYMQLSSLTSEDSAVYYCARSNYYGSSYVWFFDVWGAGTTVTVSSGGGGSGGGGSGGGGSGGGGSGGGGSQIVLSQSPTILSASPGEKVTMTCRASSSVSYMDWYQQKPGSSPKPWIYATSNLASGVPARFSGSGSGTSYSLTISRVEAEDAATYYCQQWISNPPTFGAGTKLELKGGGGSGGKEFTLDFSTAKTYVDSLNVIRSAIGTPLQTISSGGTSLLMIDSGSGDNLFAVDVRGIDPEEGRFNNLRLIVERNNLYVTGFVNRTNNVFYRFADFSHVTFPGTTAVTLSGDSSYTTLQRVAGISRTGMQINRHSLTTSYLDLMSHSGTSLTQSVARAMLRFVTVTAEALRFRQIQRGFRTTLDDLSGRSYVMTAEDVDLTLNWGRLSSVLPDYHGQDSVRVGRISFGSINAILGSVALILNSHHHASRVARKDEL

SEQ ID NO: 199 - protein, 506 aa, Artificial Sequence
  Synthetic polypeptide
QVQLQQPGAELVKPGASVKMSCKTSGYTFTSYNVHWVKQTPGQGLEWIGAIYPGNGDTSFNQKFKGKATLTADKSSSTVYMQLSSLTSEDSAVYYCARSNYYGSSYVWFFDVWGAGTTVTVSSGSTSGSGKPGSGEGSQIVLSQSPTILSASPGEKVTMTCRASSSVSYMDWYQQKPGSSPKPWIYATSNLASGVPARFSGSGSGTSYSLTISRVEAEDAATYYCQQWISNPPTFGAGTKLELKGGGGSGGKEFTLDFSTAKTYVDSLNVIRSAIGTPLQTISSGGTSLLMIDSGSGDNLFAVDVRGIDPEEGRFNNLRLIVERNNLYVTGFVNRTNNVFYRFADFSHVTFPGTTAVTLSGDSSYTTLQRVAGISRTGMQINRHSLTTSYLDLMSHSGTSLTQSVARAMLRFVTVTAEALRFRQIQRGFRTTLDDLSGRSYVMTAEDVDLTLNWGRLSSVLPDYHGQDSVRVGRISFGSINAILGSVALILNSHHHASRVARKDEL

SEQ ID NO: 200 - protein, 534 aa, Artificial Sequence
  Synthetic polypeptide
QVQLQQPGAELVKPGASVKMSCKTSGYTFTSYNVHWVKQTPGQGLEWIGAIYPGNGDTSFNQKFKGKATLTADKSSSTVYMQLSSLTSEDSAVYYCARSNYYGSSYVWFFDVWGAGTTVTVSSGGGGSGGGGSGGGGSGGGGSGGGGSQIVLSQSPTILSASPGEKVTMTCRASSSVSYMDWYQQKPGSSPKPWIYATSNLASGVPARFSGSGSGTSYSLTISRVEAEDAATYYCQQWISNPPTFGAGTKLELKEFPKPSTPPGSSGGAPGILGFVFTLKEFTLDFSTAKTYVDSLNVIRSAIGTPLQTISSGGTSLLMIDSGSGDNLFAVDVRGIDPEEGRFNNLRLIVERNNLYVTGFVNRTNNVFYRFADFSHVTFPGTTAVTLSGDSSYTTLQRVAGISRTGMQINRHSLTTSYLDLMSHSGTSLTQSVARAMLRFVTVTAEALRFRQIQRGFRTTLDDLSGRSYVMTAEDVDLTLNWGRLSSVLPDYHGQDSVRVGRISFGSINAILGSVALILNSHHHASRVARKDEL

SEQ ID NO: 201 - protein, 524 aa, Artificial Sequence
  Synthetic polypeptide
QVQLQQPGAELVKPGASVKMSCKTSGYTFTSYNVHWVKQTPGQGLEWIGAIYPGNGDTSFNQKFKGKATLTADKSSSTVYMQLSSLTSEDSAVYYCARSNYYGSSYVWFFDVWGAGTTVTVSSGSTSGSGKPGSGEGSQIVLSQSPTILSASPGEKVTMTCRASSSVSYMDWYQQKPGSSPKPWIYATSNLASGVPARFSGSGSGTSYSLTISRVEAEDAATYYCQQWISNPPTFGAGTKLELKEFPKPSTPPGSSGGAPGILGFVFTLKEFTLDFSTAKTYVDSLNVIRSAIGTPLQTISSGGTSLLMIDSGSGDNLFAVDVRGIDPEEGRFNNLRLIVERNNLYVTGFVNRTNNVFYRFADFSHVTFPGTTAVTLSGDSSYTTLQRVAGISRTGMQINRHSLTTSYLDLMSHSGTSLTQSVARAMLRFVTVTAEALRFRQIQRGFRTTLDDLSGRSYVMTAEDVDLTLNWGRLSSVLPDYHGQDSVRVGRISFGSINAILGSVALILNSHHHASRVARKDEL

SEQ ID NO: 202 - protein, 514 aa, Artificial Sequence
  Synthetic polypeptide
QVQLQQPGAELVKPGASVKMSCKTSGYTFTSYNVHWVKQTPGQGLEWIGAIYPGNGDTSFNQKFKGKATLTADKSSSTVYMQLSSLTSEDSAVYYCARSNYYGSSYVWFFDVWGAGTTVTVSSGGGGSQIVLSQSPTILSASPGEKVTMTCRASSSVSYMDWYQQKPGSSPKPWIYATSNLASGVPARFSGSGSGTSYSLTISRVEAEDAATYYCQQWISNPPTFGAGTKLELKEFPKPSTPPGSSGGAPGILGFVFTLKEFTLDFSTAKTYVDSLNVIRSAIGTPLQTISSGGTSLLMIDSGSGDNLFAVDVRGIDPEEGRFNNLRLIVERNNLYVTGFVNRTNNVFYRFADFSHVTFPGTTAVTLSGDSSYTTLQRVAGISRTGMQINRHSLTTSYLDLMSHSGTSLTQSVARAMLRFVTVTAEALRFRQIQRGFRTTLDDLSGRSYVMTAEDVDLTLNWGRLSSVLPDYHGQDSVRVGRISFGSINAILGSVALILNSHHHASRVARKDEL

SEQ ID NO: 203 - protein, 496 aa, Artificial Sequence
  Synthetic polypeptide
QVQLQQPGAELVKPGASVKMSCKTSGYTFTSYNVHWVKQTPGQGLEWIGAIYPGNGDTSFNQKFKGKATLTADKSSSTVYMQLSSLTSEDSAVYYCARSNYYGSSYVWFFDVWGAGTTVTVSSGGGGSQIVLSQSPTILSASPGEKVTMTCRASSSVSYMDWYQQKPGSSPKPWIYATSNLASGVPARFSGSGSGTSYSLTISRVEAEDAATYYCQQWISNPPTFGAGTKLELKGGGGSGGKEFTLDFSTAKTYVDSLNVIRSAIGTPLQTISSGGTSLLMIDSGTGDNLFAVDVRGIDPEEGRFNNLRLIVERNNLYVTGFVNRTNNVFYRFADFSHVTFPGTTAVTLSGDSSYTTLQRVAGISRTGMQINRHSLTTSYLDLMSHSGTSLTQSVARAMLRFVTVTAEALRFRQIQRGFRTTLDDLSGRSYVMTAEDVDLTLNWGRLSSVLPDYHGQDSVRVGRISFGSINAILGSVALILNSHHHASRVARKDEL

SEQ ID NO: 204 - protein, 521 aa, Artificial Sequence
  Synthetic polypeptide
QVQLQQPGAELVKPGASVKMSCKTSGYTFTSYNVHWVKQTPGQGLEWIGAIYPGNGDTSFNQKFKGKATLTADKSSSTVYMQLSSLTSEDSAVYYCARSNYYGSSYVWFFDVWGAGTTVTVSSGGGGSGGGGSGGGGSGGGGSGGGGSQIVLSQSPTILSASPGEKVTMTCRASSSVSYMDWYQQKPGSSPKPWIYATSNLASGVPARFSGSGSGTSYSLTISRVEAEDAATYYCQQWISNPPTFGAGTKLELKEFPKPSTPPGSSGGAPKEFTLDFSTAKTYVDSLNVIRSAIGTPLQTISSGGTSLLMIDSGSGDNLFAVDVRGIAPEEGRFNNLRLIVERNNLYVTGFVNRTNNVFYRFADFSHVTFPGTTAVTLSADSSYTTLQRVAGISRTGMQINRHSLTTSYLDLMSHSATSLTQSVARAMLRFVTVTAEALRFRQIQRGFRTTLDDLSGASYVMTAEDVDLTLNWGRLSSVLPDYHGQDSVRVGRISFGSINAILGSVALILNSHHHASKDEL

SEQ ID NO: 205 - protein, 515 aa, Artificial Sequence
  Synthetic polypeptide
QVQLQQPGAELVKPGASVKMSCKTSGYTFTSYNVHWVKQTPGQGLEWIGAIYPGNGDTSFNQKFKGKATLTADKSSSTVYMQLSSLTSEDSAVYYCARSNYYGSSYVWFFDVWGAGTTVTVSSGSTSGSGKPGSGEGSQIVLSQSPTILSASPGEKVTMTCRASSSVSYMDWYQQKPGSSPKPWIYATSNLASGVPARFSGSGSGTSYSLTISRVEAEDAATYYCQQWISNPPTFGAGTKLELKEFPKPSTPPGSSGGAPKEFTLDFSTAKTYVDSLNVIRSAIGTPLQTISSGGTSLLMIDNLVPMVATVVDVRGIDPEEGRFNNLRLIVERNNLYVTGFVNRTNNVFYRFADFSHVTFPGTTAVTLSGDSSYTTLQRVAGISRTGMQINRHSLTTSYLDLMSHSGTSLTQSVARAMLRFVTVTAEALRFRQIQRGFRTTLDDLSGRSYVMTAEDVDLTLNWGRLSSVLPDYHGQDSVRVGRISFGSINAILGSVALILNSHHHASRVARKDEL

SEQ ID NO: 206 - protein, 530 aa, Artificial Sequence
  Synthetic polypeptide
QVQLQQPGAELVKPGASVKMSCKTSGYTFTSYNVHWVKQTPGQGLEWIGAIYPGNGDTSFNQKFKGKATLTADKSSSTVYMQLSSLTSEDSAVYYCARSNYYGSSYVWFFDVWGAGTTVTVSSGGGGSGGGGSGGGGSGGGGSGGGGSQIVLSQSPTILSASPGEKVTMTCRASSSVSYMDWYQQKPGSSPKPWIYATSNLASGVPARFSGSGSGTSYSLTISRVEAEDAATYYCQQWISNPPTFGAGTKLELKEFPKPSTPPGSSGGAPGILGFVFTLKEFTLDFSTAKTYVDSLNVIRSAIGTPLQTISSGGTSLLMIDSGSGDNLFAVDVRGIDPEEGRFNNLRLIVERNNLYVTGFVNRTNNVFYRFADFSHVTFPGTTAVTLSGDSSYTTLQRVAGISRTGMQINRHSLTTSYLDLMSHSGTSLTQSVARAMLRFVTVTAEALRFRQIQRGFRTTLDDLSGRSYVMTAEDVDLTLNWGRLSSVLPDYHGQDSVRVGRISFGSINAILGSVALILNSHHHASKDEL

SEQ ID NO: 207 - protein, 512 aa, Artificial Sequence
  Synthetic polypeptide
QVQLQQPGAELVKPGASVKMSCKASGYTFTSYNMHWVKQTPGRGLEWIGAIYPGNGDTSYNQKFKGKATLTADKSSSTAYMQLSSLTSEDSAVYYCARSTYYGGDWYFNVWGAGTTVTVSAGSTSGSGKPGSGEGSTKGQIVLSQSPAILSASPGEKVTMTCRASSSVSYIHWFQQKPGSSPKPWIYATSNLASGVPVRFSGSGSGTSYSLTISRVEAEDAATYYCQQWTSNPPTFGGGTKLEIKEFPKPSTPPGSSGGAPKEFTLDFSTAKTYVDSLNVIRSAIGTPLQTISSGGTSLLMIDSGSGDNLFAVDVRGIDPEEGRFNNLRLIVERNNLYVTGFVNRTNNVFYRFADFSHVTFPGTTAVTLSGDSSYTTLQRVAGISRTGMQINRHSLTTSYLDLMSHSGTSLTQSVARAMLRFVTVTAEALRFRQIQRGFRTTLDDLSGRSYVMTAEDVDLTLNWGRLSSVLPDYHGQDSVRVGRISFGSINAILGSVALILNSHHHASRVAR

SEQ ID NO: 208 - protein, 493 aa, Artificial Sequence
  Synthetic polypeptide
QVQLQQPGAELVKPGASVKMSCKASGYTFTSYNMHWVKQTPGRGLEWIGAIYPGNGDTSYNQKFKGKATLTADKSSSTAYMQLSSLTSEDSAVYYCARSTYYGGDWYFNVWGAGTTVTVSAGGGGSTKGQIVLSQSPAILSASPGEKVTMTCRASSSVSYIHWFQQKPGSSPKPWIYATSNLASGVPVRFSGSGSGTSYSLTISRVEAEDAATYYCQQWTSNPPTFGGGTKLEIKGGGGSGGKEFTLDFSTAKTYVDSLNVIRSAIGTPLQTISSGGTSLLMIDSGSGDNLFAVDVRGIDPEEGRFNNLRLIVERNNLYVTGFVNRTNNVFYRFADFSHVTFPGTTAVTLSGDSSYTTLQRVAGISRTGMQINRHSLTTSYLDLMSHSGTSLTQSVARAMLRFVTVTAEALRFRQIQRGFRTTLDDLSGRSYVMTAEDVDLTLNWGRLSSVLPDYHGQDSVRVGRISFGSINAILGSVALILNSHHHASRVAR

SEQ ID NO: 209 - protein, 526 aa, Artificial Sequence
  Synthetic polypeptide
QVQLQQPGAELVKPGASVKMSCKASGYTFTSYNMHWVKQTPGRGLEWIGAIYPGNGDTSYNQKFKGKATLTADKSSSTAYMQLSSLTSEDSAVYYCARSTYYGGDWYFNVWGAGTTVTVSAGGGGSGGGGSGGGGSGGGGSGGGGSTKGQIVLSQSPAILSASPGEKVTMTCRASSSVSYIHWFQQKPGSSPKPWIYATSNLASGVPVRFSGSGSGTSYSLTISRVEAEDAATYYCQQWTSNPPTFGGGTKLEIKEFPKPSTPPGSSGGAPKEFTLDFSTAKTYVDSLNVIRSAIGTPLQTISSGGTSLLMIDSGTGDNLFAVDVRGIDPEEGRFNNLRLIVERNNLYVTGFVNRTNNVFYRFADFSHVTFPGTTAVTLSGDSSYTTLQRVAGISRTGMQINRHSLTTSYLDLMSHSGTSLTQSVARAMLRFVTVTAEALRFRQIQRGFRTTLDDLSGRSYVMTAEDVDLTLNWGRLSSVLPDYHGQDSVRVGRISFGSINAILGSVALILNSHHHASRVARKDEL

SEQ ID NO: 210 - protein, 502 aa, Artificial Sequence
  Synthetic polypeptide
QVQLQQPGAELVKPGASVKMSCKASGYTFTSYNMHWVKQTPGRGLEWIGAIYPGNGDTSYNQKFKGKATLTADKSSSTAYMQLSSLTSEDSAVYYCARSTYYGGDWYFNVWGAGTTVTVSAGGGGSTKGQIVLSQSPAILSASPGEKVTMTCRASSSVSYIHWFQQKPGSSPKPWIYATSNLASGVPVRFSGSGSGTSYSLTISRVEAEDAATYYCQQWTSNPPTFGGGTKLEIKEFPKPSTPPGSSGGAPKEFTLDFSTAKTYVDSLNVIRSAIGTPLQTISSGGTSLLMIDSGSGDNLFAVDVRGIAPEEGRFNNLRLIVERNNLYVTGFVNRTNNVFYRFADFSHVTFPGTTAVTLSADSSYTTLQRVAGISRTGMQINRHSLTTSYLDLMSHSATSLTQSVARAMLRFVTVTAEALRFRQIQRGFRTTLDDLSGASYVMTAEDVDLTLNWGRLSSVLPDYHGQDSVRVGRISFGSINAILGSVALILNSHHHASRVAR

SEQ ID NO: 211 - protein, 512 aa, Artificial Sequence
  Synthetic polypeptide
QVQLQQPGAELVKPGASVKMSCKASGYTFTSYNMHWVKQTPGRGLEWIGAIYPGNGDTSYNQKFKGKATLTADKSSSTAYMQLSSLTSEDSAVYYCARSTYYGGDWYFNVWGAGTTVTVSAGSTSGSGKPGSGEGSTKGQIVLSQSPAILSASPGEKVTMTCRASSSVSYIHWFQQKPGSSPKPWIYATSNLASGVPVRFSGSGSGTSYSLTISRVEAEDAATYYCQQWTSNPPTFGGGTKLEIKEFPKPSTPPGSSGGAPKEFTLDFSTAKTYVDSLNVIRSAIGTPLQTISSGGTSLLMIDNLVPMVATVVDVRGIDPEEGRFNNLRLIVERNNLYVTGFVNRTNNVFYRFADFSHVTFPGTTAVTLSGDSSYTTLQRVAGISRTGMQINRHSLTTSYLDLMSHSGTSLTQSVARAMLRFVTVTAEALRFRQIQRGFRTTLDDLSGRSYVMTAEDVDLTLNWGRLSSVLPDYHGQDSVRVGRISFGSINAILGSVALILNSHHHASRVAR

SEQ ID NO: 212 - protein, 521 aa, Artificial Sequence
  Synthetic polypeptide
QVQLQQPGAELVKPGASVKMSCKASGYTFTSYNMHWVKQTPGRGLEWIGAIYPGNGDTSYNQKFKGKATLTADKSSSTAYMQLSSLTSEDSAVYYCARSTYYGGDWYFNVWGAGTTVTVSAGSTSGSGKPGSGEGSTKGQIVLSQSPAILSASPGEKVTMTCRASSSVSYIHWFQQKPGSSPKPWIYATSNLASGVPVRFSGSGSGTSYSLTISRVEAEDAATYYCQQWTSNPPTFGGGTKLEIKEFPKPSTPPGSSGGAPGILGFVFTLKEFTLDFSTAKTYVDSLNVIRSAIGTPLQTISSGGTSLLMIDSGSGDNLFAVDVRGIDPEEGRFNNLRLIVERNNLYVTGFVNRTNNVFYRFADFSHVTFPGTTAVTLSGDSSYTTLQRVAGISRTGMQINRHSLTTSYLDLMSHSGTSLTQSVARAMLRFVTVTAEALRFRQIQRGFRTTLDDLSGRSYVMTAEDVDLTLNWGRLSSVLPDYHGQDSVRVGRISFGSINAILGSVALILNSHHHASAVAA

SEQ ID NO: 213 - protein, 512 aa, Artificial Sequence; identical to SEQ ID NO: 207
  Synthetic polypeptide

SEQ ID NO: 214 - protein, 513 aa, Artificial Sequence
  Synthetic polypeptide
QVQLQQPGAELVKPGASVKMSCKASGYTFTSYNMHWVKQTPGRGLEWIGAIYPGNGDTSYNQKFKGKATLTADKSSSTAYMQLSSLTSEDSAVYYCARSTYYGGDWYFNVWGAGTTVTVSAGGGGSGGGGSGGGGSGGGGSGGGGSTKGQIVLSQSPAILSASPGEKVTMTCRASSSVSYIHWFQQKPGSSPKPWIYATSNLASGVPVRFSGSGSGTSYSLTISRVEAEDAATYYCQQWTSNPPTFGGGTKLEIKGGGGSGGKEFTLDFSTAKTYVDSLNVIRSAIGTPLQTISSGGTSLLMIDSGSGDNLFAVDVRGIDPEEGRFNNLRLIVERNNLYVTGFVNRTNNVFYRFADFSHVTFPGTTAVTLSGDSSYTTLQRVAGISRTGMQINRHSLTTSYLDLMSHSGTSLTQSVARAMLRFVTVTAEALRFRQIQRGFRTTLDDLSGRSYVMTAEDVDLTLNWGRLSSVLPDYHGQDSVRVGRISFGSINAILGSVALILNSHHHASRVAR

SEQ ID NO: 215 - protein, 493 aa, Artificial Sequence
  Synthetic polypeptide
QVQLQQPGAELVKPGASVKMSCKASGYTFTSYNMHWVKQTPGRGLEWIGAIYPGNGDTSYNQKFKGKATLTADKSSSTAYMQLSSLTSEDSAVYYCARSTYYGGDWYFNVWGAGTTVTVSAGGGGSTKGQIVLSQSPAILSASPGEKVTMTCRASSSVSYIHWFQQKPGSSPKPWIYATSNLASGVPVRFSGSGSGTSYSLTISRVEAEDAATYYCQQWTSNPPTFGGGTKLEIKGGGGSGGKEFTLDFSTAKTYVDSLNVIRSAIGTPLQTISSGGTSLLMIDSGTGDNLFAVDVRGIDPEEGRFNNLRLIVERNNLYVTGFVNRTNNVFYRFADFSHVTFPGTTAVTLSGDSSYTTLQRVAGISRTGMQINRHSLTTSYLDLMSHSGTSLTQSVARAMLRFVTVTAEALRFRQIQRGFRTTLDDLSGRSYVMTAEDVDLTLNWGRLSSVLPDYHGQDSVRVGRISFGSINAILGSVALILNSHHHASRVAR

SEQ ID NO: 216 - protein, 508 aa, Artificial Sequence
  Synthetic polypeptide
QVQLQQPGAELVKPGASVKMSCKASGYTFTSYNMHWVKQTPGRGLEWIGAIYPGNGDTSYNQKFKGKATLTADKSSSTAYMQLSSLTSEDSAVYYCARSTYYGGDWYFNVWGAGTTVTVSAGSTSGSGKPGSGEGSTKGQIVLSQSPAILSASPGEKVTMTCRASSSVSYIHWFQQKPGSSPKPWIYATSNLASGVPVRFSGSGSGTSYSLTISRVEAEDAATYYCQQWTSNPPTFGGGTKLEIKEFPKPSTPPGSSGGAPKEFTLDFSTAKTYVDSLNVIRSAIGTPLQTISSGGTSLLMIDSGSGDNLFAVDVRGIAPEEGRFNNLRLIVERNNLYVTGFVNRTNNVFYRFADFSHVTFPGTTAVTLSADSSYTTLQRVAGISRTGMQINRHSLTTSYLDLMSHSATSLTQSVARAMLRFVTVTAEALRFRQIQRGFRTTLDDLSGASYVMTAEDVDLTLNWGRLSSVLPDYHGQDSVRVGRISFGSINAILGSVALILNSHHHAS

SEQ ID NO: 217 - protein, 512 aa, Artificial Sequence; identical to SEQ ID NO: 211
  Synthetic polypeptide

SEQ ID NO: 218 - protein, 517 aa, Artificial Sequence
  Synthetic polypeptide
QVQLQQPGAELVKPGASVKMSCKASGYTFTSYNMHWVKQTPGRGLEWIGAIYPGNGDTSYNQKFKGKATLTADKSSSTAYMQLSSLTSEDSAVYYCARSTYYGGDWYFNVWGAGTTVTVSAGSTSGSGKPGSGEGSTKGQIVLSQSPAILSASPGEKVTMTCRASSSVSYIHWFQQKPGSSPKPWIYATSNLASGVPVRFSGSGSGTSYSLTISRVEAEDAATYYCQQWTSNPPTFGGGTKLEIKEFPKPSTPPGSSGGAPGILGFVFTLKEFTLDFSTAKTYVDSLNVIRSAIGTPLQTISSGGTSLLMIDSGSGDNLFAVDVRGIDPEEGRFNNLRLIVERNNLYVTGFVNRTNNVFYRFADFSHVTFPGTTAVTLSGDSSYTTLQRVAGISRTGMQINRHSLTTSYLDLMSHSGTSLTQSVARAMLRFVTVTAEALRFRQIQRGFRTTLDDLSGRSYVMTAEDVDLTLNWGRLSSVLPDYHGQDSVRVGRISFGSINAILGSVALILNSHHHAS

SEQ ID NO: 219 - protein, 511 aa, Artificial Sequence
  Synthetic polypeptide
EIVLTQSPATLSLSPGERATLSCRASQSVSSYLAWYQQKPGQAPRLLIYDASNRATGIPARFSGSGSGTDFTLTISSLEPEDFAVYYCQQRSNWPITFGQGTRLEIKGSTSGSGKPGSGEGSEVQLVESGGGLVQPGRSLRLSCAASGFTFNDYAMHWVRQAPGKGLEWVSTISWNSGSIGYADSVKGRFTISRDNAKKSLYLQMNSLRAEDTALYYCAKDIQYGNYYYGMDVWGQGTTVTVSSEFPKPSTPPGSSGGAPKEFTLDFSTAKTYVDSLNVIRSAIGTPLQTISSGGTSLLMIDSGSGDNLFAVDVRGIDPEEGRFNNLRLIVERNNLYVTGFVNRTNNVFYRFADFSHVTFPGTTAVTLSGDSSYTTLQRVAGISRTGMQINRHSLTTSYLDLMSHSGTSLTQSVARAMLRFVTVTAEALRFRQIQRGFRTTLDDLSGRSYVMTAEDVDLTLNWGRLSSVLPDYHGQDSVRVGRISFGSINAILGSVALILNSHHHASRVAR

SEQ ID NO: 220 - protein, 501 aa, Artificial Sequence
  Synthetic polypeptide
EIVLTQSPATLSLSPGERATLSCRASQSVSSYLAWYQQKPGQAPRLLIYDASNRATGIPARFSGSGSGTDFTLTISSLEPEDFAVYYCQQRSNWPITFGQGTRLEIKGGGGSEVQLVESGGGLVQPGRSLRLSCAASGFTFNDYAMHWVRQAPGKGLEWVSTISWNSGSIGYADSVKGRFTISRDNAKKSLYLQMNSLRAEDTALYYCAKDIQYGNYYYGMDVWGQGTTVTVSSEFPKPSTPPGSSGGAPKEFTLDFSTAKTYVDSLNVIRSAIGTPLQTISSGGTSLLMIDSGSGDNLFAVDVRGIDPEEGRFNNLRLIVERNNLYVTGFVNRTNNVFYRFADFSHVTFPGTTAVTLSGDSSYTTLQRVAGISRTGMQINRHSLTTSYLDLMSHSGTSLTQSVARAMLRFVTVTAEALRFRQIQRGFRTTLDDLSGRSYVMTAEDVDLTLNWGRLSSVLPDYHGQDSVRVGRISFGSINAILGSVALILNSHHHASRVAR

SEQ ID NO: 221 - protein, 511 aa, Artificial Sequence
  Synthetic polypeptide
EIVLTQSPATLSLSPGERATLSCRASQSVSSYLAWYQQKPGQAPRLLIYDASNRATGIPARFSGSGSGTDFTLTISSLEPEDFAVYYCQQRSNWPITFGQGTRLEIKGSTSGSGKPGSGEGSEVQLVESGGGLVQPGRSLRLSCAASGFTFNDYAMHWVRQAPGKGLEWVSTISWNSGSIGYADSVKGRFTISRDNAKKSLYLQMNSLRAEDTALYYCAKDIQYGNYYYGMDVWGQGTTVTVSSEFPKPSTPPGSSGGAPKEFTLDFSTAKTYVDSLNVIRSAIGTPLQTISSGGTSLLMIDSGTGDNLFAVDVRGIDPEEGRFNNLRLIVERNNLYVTGFVNRTNNVFYRFADFSHVTFPGTTAVTLSGDSSYTTLQRVAGISRTGMQINRHSLTTSYLDLMSHSGTSLTQSVARAMLRFVTVTAEALRFRQIQRGFRTTLDDLSGRSYVMTAEDVDLTLNWGRLSSVLPDYHGQDSVRVGRISFGSINAILGSVALILNSHHHASRVAR

SEQ ID NO: 222 - protein, 511 aa, Artificial Sequence
  Synthetic polypeptide
EIVLTQSPATLSLSPGERATLSCRASQSVSSYLAWYQQKPGQAPRLLIYDASNRATGIPARFSGSGSGTDFTLTISSLEPEDFAVYYCQQRSNWPITFGQGTRLEIKGSTSGSGKPGSGEGSEVQLVESGGGLVQPGRSLRLSCAASGFTFNDYAMHWVRQAPGKGLEWVSTISWNSGSIGYADSVKGRFTISRDNAKKSLYLQMNSLRAEDTALYYCAKDIQYGNYYYGMDVWGQGTTVTVSSEFPKPSTPPGSSGGAPKEFTLDFSTAKTYVDSLNVIRSAIGTPLQTISSGGTSLLMIDSGSGDNLFAVDVRGIAPEEGRFNNLRLIVERNNLYVTGFVNRTNNVFYRFADFSHVTFPGTTAVTLSADSSYTTLQRVAGISRTGMQINRHSLTTSYLDLMSHSATSLTQSVARAMLRFVTVTAEALRFRQIQRGFRTTLDDLSGASYVMTAEDVDLTLNWGRLSSVLPDYHGQDSVRVGRISFGSINAILGSVALILNSHHHASRVAR

SEQ ID NO: 223 - protein, 512 aa, Artificial Sequence
  Synthetic polypeptide
EIVLTQSPATLSLSPGERATLSCRASQSVSSYLAWYQQKPGQAPRLLIYDASNRATGIPARFSGSGSGTDFTLTISSLEPEDFAVYYCQQRSNWPITFGQGTRLEIKGGGGSGGGGSGGGGSGGGGSGGGGSEVQLVESGGGLVQPGRSLRLSCAASGFTFNDYAMHWVRQAPGKGLEWVSTISWNSGSIGYADSVKGRFTISRDNAKKSLYLQMNSLRAEDTALYYCAKDIQYGNYYYGMDVWGQGTTVTVSSGGGGSGGKEFTLDFSTAKTYVDSLNVIRSAIGTPLQTISSGGTSLLMIDNLVPMVATVVDVRGIDPEEGRFNNLRLIVERNNLYVTGFVNRTNNVFYRFADFSHVTFPGTTAVTLSGDSSYTTLQRVAGISRTGMQINRHSLTTSYLDLMSHSGTSLTQSVARAMLRFVTVTAEALRFRQIQRGFRTTLDDLSGRSYVMTAEDVDLTLNWGRLSSVLPDYHGQDSVRVGRISFGSINAILGSVALILNSHHHASRVAR

SEQ ID NO: 224 - protein, 521 aa, Artificial Sequence
  Synthetic polypeptide
EIVLTQSPATLSLSPGERATLSCRASQSVSSYLAWYQQKPGQAPRLLIYDASNRATGIPARFSGSGSGTDFTLTISSLEPEDFAVYYCQQRSNWPITFGQGTRLEIKGGGGSGGGGSGGGGSGGGGSGGGGSEVQLVESGGGLVQPGRSLRLSCAASGFTFNDYAMHWVRQAPGKGLEWVSTISWNSGSIGYADSVKGRFTISRDNAKKSLYLQMNSLRAEDTALYYCAKDIQYGNYYYGMDVWGQGTTVTVSSEFPKPSTPPGSSGGAPKEFTLDFSTAKTYVDSLNVIRSAIGTPLQTISSGGTSLLMIDSGSGDNLFAVDVRGIDPEEGRFNNLRLIVERNNLYVTGFVNRTNNVFYRFADFSHVTFPGTTAVTLSGDSSYTTLQRVAGISRTGMQINRHSLTTSYLDLMSHSGTSLTQSVARAMLRFVTVTAEALRFRQIQRGFRTTLDDLSGRSYVMTAEDVDLTLNWGRLSSVLPDYHGQDSVRVGRISFGSINAILGSVALILNSHHHASAVAA

SEQ ID NO: 225 - protein, 514 aa, Artificial Sequence
  Synthetic polypeptide
QIVLSQSPAILSASPGEKVTMTCRASSSVSYMHWYQQKPGSSPKPWIYAPSNLASGVPARFSGSGSGTSYSLTISRVEAEDAATYYCQQWSFNPPTFGAGTKLELKSGSTSGSGKPGSGEGSQAYLQQSGAELVRPGASVKMSCKASGYTFTSYNMHWVKQTPRQGLEWIGAIYPGNGDTSYNQKFKGKATLTVDKSSSTAYMQLSSLTSEDSAVYFCARVVYYSNSYWYFDVWGTGTTVTVSEFPKPSTPPGSSGGAPKEFTLDFSTAKTYVDSLNVIRSAIGTPLQTISSGGTSLLMIDSGSGDNLFAVDVRGIDPEEGRFNNLRLIVERNNLYVTGFVNRTNNVFYRFADFSHVTFPGTTAVTLSGDSSYTTLQRVAGISRTGMQINRHSLTTSYLDLMSHSGTSLTQSVARAMLRFVTVTAEALRFRQIQRGFRTTLDDLSGRSYVMTAEDVDLTLNWGRLSSVLPDYHGQDSVRVGRISFGSINAILGSVALILNSHHHASRVARKDEL

SEQ ID NO: 226 - protein, 511 aa, Artificial Sequence
  Synthetic polypeptide
QIVLSQSPAILSASPGEKVTMTCRASSSVSYMHWYQQKPGSSPKPWIYAPSNLASGVPARFSGSGSGTSYSLTISRVEAEDAATYYCQQWSFNPPTFGAGTKLELKSGGGGSGGGGSGGGGSGGGGSGGGGSQAYLQQSGAELVRPGASVKMSCKASGYTFTSYNMHWVKQTPRQGLEWIGAIYPGNGDTSYNQKFKGKATLTVDKSSSTAYMQLSSLTSEDSAVYFCARVVYYSNSYWYFDVWGTGTTVTVSGGGGSGGKEFTLDFSTAKTYVDSLNVIRSAIGTPLQTISSGGTSLLMIDSGSGDNLFAVDVRGIDPEEGRFNNLRLIVERNNLYVTGFVNRTNNVFYRFADFSHVTFPGTTAVTLSGDSSYTTLQRVAGISRTGMQINRHSLTTSYLDLMSHSGTSLTQSVARAMLRFVTVTAEALRFRQIQRGFRTTLDDLSGRSYVMTAEDVDLTLNWGRLSSVLPDYHGQDSVRVGRISFGSINAILGSVALILNSHHHASRVAR

SEQ ID NO: 227 - protein, 511 aa, Artificial Sequence
  Synthetic polypeptide
QIVLSQSPAILSASPGEKVTMTCRASSSVSYMHWYQQKPGSSPKPWIYAPSNLASGVPARFSGSGSGTSYSLTISRVEAEDAATYYCQQWSFNPPTFGAGTKLELKSGGGGSGGGGSGGGGSGGGGSGGGGSQAYLQQSGAELVRPGASVKMSCKASGYTFTSYNMHWVKQTPRQGLEWIGAIYPGNGDTSYNQKFKGKATLTVDKSSSTAYMQLSSLTSEDSAVYFCARVVYYSNSYWYFDVWGTGTTVTVSGGGGSGGKEFTLDFSTAKTYVDSLNVIRSAIGTPLQTISSGGTSLLMIDSGTGDNLFAVDVRGIDPEEGRFNNLRLIVERNNLYVTGFVNRTNNVFYRFADFSHVTFPGTTAVTLSGDSSYTTLQRVAGISRTGMQINRHSLTTSYLDLMSHSGTSLTQSVARAMLRFVTVTAEALRFRQIQRGFRTTLDDLSGRSYVMTAEDVDLTLNWGRLSSVLPDYHGQDSVRVGRISFGSINAILGSVALILNSHHHASRVAR

SEQ ID NO: 228 - protein, 497 aa, Artificial Sequence
  Synthetic polypeptide
QIVLSQSPAILSASPGEKVTMTCRASSSVSYMHWYQQKPGSSPKPWIYAPSNLASGVPARFSGSGSGTSYSLTISRVEAEDAATYYCQQWSFNPPTFGAGTKLELKSGSTSGSGKPGSGEGSQAYLQQSGAELVRPGASVKMSCKASGYTFTSYNMHWVKQTPRQGLEWIGAIYPGNGDTSYNQKFKGKATLTVDKSSSTAYMQLSSLTSEDSAVYFCARVVYYSNSYWYFDVWGTGTTVTVSGGGGSGGKEFTLDFSTAKTYVDSLNVIRSAIGTPLQTISSGGTSLLMIDSGSGDNLFAVDVRGIAPEEGRFNNLRLIVERNNLYVTGFVNRTNNVFYRFADFSHVTFPGTTAVTLSADSSYTTLQRVAGISRTGMQINRHSLTTSYLDLMSHSATSLTQSVARAMLRFVTVTAEALRFRQIQRGFRTTLDDLSGASYVMTAEDVDLTLNWGRLSSVLPDYHGQDSVRVGRISFGSINAILGSVALILNSHHHAS

SEQ ID NO: 229 - protein, 491 aa, Artificial Sequence
  Synthetic polypeptide
QIVLSQSPAILSASPGEKVTMTCRASSSVSYMHWYQQKPGSSPKPWIYAPSNLASGVPARFSGSGSGTSYSLTISRVEAEDAATYYCQQWSFNPPTFGAGTKLELKSGGGGSQAYLQQSGAELVRPGASVKMSCKASGYTFTSYNMHWVKQTPRQGLEWIGAIYPGNGDTSYNQKFKGKATLTVDKSSSTAYMQLSSLTSEDSAVYFCARVVYYSNSYWYFDVWGTGTTVTVSGGGGSGGKEFTLDFSTAKTYVDSLNVIRSAIGTPLQTISSGGTSLLMIDNLVPMVATVVDVRGIDPEEGRFNNLRLIVERNNLYVTGFVNRTNNVFYRFADFSHVTFPGTTAVTLSGDSSYTTLQRVAGISRTGMQINRHSLTTSYLDLMSHSGTSLTQSVARAMLRFVTVTAEALRFRQIQRGFRTTLDDLSGRSYVMTAEDVDLTLNWGRLSSVLPDYHGQDSVRVGRISFGSINAILGSVALILNSHHHASRVAR

SEQ ID NO: 230 - protein, 506 aa, Artificial Sequence
  Synthetic polypeptide
QIVLSQSPAILSASPGEKVTMTCRASSSVSYMHWYQQKPGSSPKPWIYAPSNLASGVPARFSGSGSGTSYSLTISRVEAEDAATYYCQQWSFNPPTFGAGTKLELKSGSTSGSGKPGSGEGSQAYLQQSGAELVRPGASVKMSCKASGYTFTSYNMHWVKQTPRQGLEWIGAIYPGNGDTSYNQKFKGKATLTVDKSSSTAYMQLSSLTSEDSAVYFCARVVYYSNSYWYFDVWGTGTTVTVSEFPKPSTPPGSSGGAPKEFTLDFSTAKTYVDSLNVIRSAIGTPLQTISSGGTSLLMIDSGSGDNLFAVDVRGIDPEEGRFNNLRLIVERNNLYVTGFVNRTNNVFYRFADFSHVTFPGTTAVTLSGDSSYTTLQRVAGISRTGMQINRHSLTTSYLDLMSHSGTSLTQSVARAMLRFVTVTAEALRFRQIQRGFRTTLDDLSGRSYVMTAEDVDLTLNWGRLSSVLPDYHGQDSVRVGRISFGSINAILGSVALILNSHHHAS

SEQ ID NO: 231 - protein, 510 aa, Artificial Sequence
  Synthetic polypeptide
QAYLQQSGAELVRPGASVKMSCKASGYTFTSYNMHWVKQTPRQGLEWIGAIYPGNGDTSYNQKFKGKATLTVDKSSSTAYMQLSSLTSEDSAVYFCARVVYYSNSYWYFDVWGTGTTVTVSGSTSGSGKPGSGEGSQIVLSQSPAILSASPGEKVTMTCRASSSVSYMHWYQQKPGSSPKPWIYAPSNLASGVPARFSGSGSGTSYSLTISRVEAEDAATYYCQQWSFNPPTFGAGTKLELKSEFPKPSTPPGSSGGAPKEFTLDFSTAKTYVDSLNVIRSAIGTPLQTISSGGTSLLMIDSGSGDNLFAVDVRGIDPEEGRFNNLRLIVERNNLYVTGFVNRTNNVFYRFADFSHVTFPGTTAVTLSGDSSYTTLQRVAGISRTGMQINRHSLTTSYLDLMSHSGTSLTQSVARAMLRFVTVTAEALRFRQIQRGFRTTLDDLSGRSYVMTAEDVDLTLNWGRLSSVLPDYHGQDSVRVGRISFGSINAILGSVALILNSHHHASRVAR

SEQ ID NO: 232 - protein, 501 aa, Artificial Sequence; identical to SEQ ID NO: 103
  Synthetic polypeptide

SEQ ID NO: 233 - protein, 501 aa, Artificial Sequence
  Synthetic polypeptide
QAYLQQSGAELVRPGASVKMSCKASGYTFTSYNMHWVKQTPRQGLEWIGAIYPGNGDTSYNQKFKGKATLTVDKSSSTAYMQLSSLTSEDSAVYFCARVVYYSNSYWYFDVWGTGTTVTVSGSTSGSGKPGSGEGSQIVLSQSPAILSASPGEKVTMTCRASSSVSYMHWYQQKPGSSPKPWIYAPSNLASGVPARFSGSGSGTSYSLTISRVEAEDAATYYCQQWSFNPPTFGAGTKLELKSGGGGSGGKEFTLDFSTAKTYVDSLNVIRSAIGTPLQTISSGGTSLLMIDSGTGDNLFAVDVRGIDPEEGRFNNLRLIVERNNLYVTGFVNRTNNVFYRFADFSHVTFPGTTAVTLSGDSSYTTLQRVAGISRTGMQINRHSLTTSYLDLMSHSGTSLTQSVARAMLRFVTVTAEALRFRQIQRGFRTTLDDLSGRSYVMTAEDVDLTLNWGRLSSVLPDYHGQDSVRVGRISFGSINAILGSVALILNSHHHASRVAR

SEQ ID NO: 234 - protein, 491 aa, Artificial Sequence
  Synthetic polypeptide
QAYLQQSGAELVRPGASVKMSCKASGYTFTSYNMHWVKQTPRQGLEWIGAIYPGNGDTSYNQKFKGKATLTVDKSSSTAYMQLSSLTSEDSAVYFCARVVYYSNSYWYFDVWGTGTTVTVSGGGGSQIVLSQSPAILSASPGEKVTMTCRASSSVSYMHWYQQKPGSSPKPWIYAPSNLASGVPARFSGSGSGTSYSLTISRVEAEDAATYYCQQWSFNPPTFGAGTKLELKSGGGGSGGKEFTLDFSTAKTYVDSLNVIRSAIGTPLQTISSGGTSLLMIDSGSGDNLFAVDVRGIAPEEGRFNNLRLIVERNNLYVTGFVNRTNNVFYRFADFSHVTFPGTTAVTLSADSSYTTLQRVAGISRTGMQINRHSLTTSYLDLMSHSATSLTQSVARAMLRFVTVTAEALRFRQIQRGFRTTLDDLSGASYVMTAEDVDLTLNWGRLSSVLPDYHGQDSVRVGRISFGSINAILGSVALILNSHHHASRVAR

SEQ ID NO: 235 - protein, 524 aa, Artificial Sequence
  Synthetic polypeptide
QAYLQQSGAELVRPGASVKMSCKASGYTFTSYNMHWVKQTPRQGLEWIGAIYPGNGDTSYNQKFKGKATLTVDKSSSTAYMQLSSLTSEDSAVYFCARVVYYSNSYWYFDVWGTGTTVTVSGGGGSGGGGSGGGGSGGGGSGGGGSQIVLSQSPAILSASPGEKVTMTCRASSSVSYMHWYQQKPGSSPKPWIYAPSNLASGVPARFSGSGSGTSYSLTISRVEAEDAATYYCQQWSFNPPTFGAGTKLELKSEFPKPSTPPGSSGGAPKEFTLDFSTAKTYVDSLNVIRSAIGTPLQTISSGGTSLLMIDNLVPMVATVVDVRGIDPEEGRFNNLRLIVERNNLYVTGFVNRTNNVFYRFADFSHVTFPGTTAVTLSGDSSYTTLQRVAGISRTGMQINRHSLTTSYLDLMSHSGTSLTQSVARAMLRFVTVTAEALRFRQIQRGFRTTLDDLSGRSYVMTAEDVDLTLNWGRLSSVLPDYHGQDSVRVGRISFGSINAILGSVALILNSHHHASRVARKDEL

SEQ ID NO: 236 - protein, 491 aa, Artificial Sequence
  Synthetic polypeptide
QAYLQQSGAELVRPGASVKMSCKASGYTFTSYNMHWVKQTPRQGLEWIGAIYPGNGDTSYNQKFKGKATLTVDKSSSTAYMQLSSLTSEDSAVYFCARVVYYSNSYWYFDVWGTGTTVTVSGGGGSQIVLSQSPAILSASPGEKVTMTCRASSSVSYMHWYQQKPGSSPKPWIYAPSNLASGVPARFSGSGSGTSYSLTISRVEAEDAATYYCQQWSFNPPTFGAGTKLELKSGGGGSGGKEFTLDFSTAKTYVDSLNVIRSAIGTPLQTISSGGTSLLMIDSGSGDNLFAVDVRGIDPEEGRFNNLRLIVERNNLYVTGFVNRTNNVFYRFADFSHVTFPGTTAVTLSGDSSYTTLQRVAGISRTGMQINRHSLTTSYLDLMSHSGTSLTQSVARAMLRFVTVTAEALRFRQIQRGFRTTLDDLSGRSYVMTAEDVDLTLNWGRLSSVLPDYHGQDSVRVGRISFGSINAILGSVALILNSHHHASAVAA

SEQ ID NO: 237 - protein, 513 aa, Artificial Sequence
  Synthetic polypeptide
QVQLVQSGAEVKKPGSSVKVSCKASGYAFSYSWINWVRQAPGQGLEWMGRIFPGDGDTDYNGKFKGRVTITADKSTSTAYMELSSLRSEDTAVYYCARNVFDGYWLVYWGQGTLVTVSSGSTSGSGKPGSGEGSDIVMTQTPLSLPVTPGEPASISCRSSKSLLHSNGITYLYWYLQKPGQSPQLLIYQMSNLVSGVPDRFSGSGSGTDFTLKISRVEAEDVGVYYCAQNLELPYTFGGGTKVEIKEFPKPSTPPGSSGGAPKEFTLDFSTAKTYVDSLNVIRSAIGTPLQTISSGGTSLLMIDSGSGDNLFAVDVRGIDPEEGRFNNLRLIVERNNLYVTGFVNRTNNVFYRFADFSHVTFPGTTAVTLSGDSSYTTLQRVAGISRTGMQINRHSLTTSYLDLMSHSGTSLTQSVARAMLRFVTVTAEALRFRQIQRGFRTTLDDLSGRSYVMTAEDVDLTLNWGRLSSVLPDYHGQDSVRVGRISFGSINAILGSVALILNSHHHASRVAR

SEQ ID NO: 238 - protein, 522 aa, Artificial Sequence
  Synthetic polypeptide
QVQLVQSGAEVKKPGSSVKVSCKASGYAFSYSWINWVRQAPGQGLEWMGRIFPGDGDTDYNGKFKGRVTITADKSTSTAYMELSSLRSEDTAVYYCARNVFDGYWLVYWGQGTLVTVSSGSTSGSGKPGSGEGSDIVMTQTPLSLPVTPGEPASISCRSSKSLLHSNGITYLYWYLQKPGQSPQLLIYQMSNLVSGVPDRFSGSGSGTDFTLKISRVEAEDVGVYYCAQNLELPYTFGGGTKVEIKEFPKPSTPPGSSGGAPGILGFVFTLKEFTLDFSTAKTYVDSLNVIRSAIGTPLQTISSGGTSLLMIDSGSGDNLFAVDVRGIDPEEGRFNNLRLIVERNNLYVTGFVNRTNNVFYRFADFSHVTFPGTTAVTLSGDSSYTTLQRVAGISRTGMQINRHSLTTSYLDLMSHSGTSLTQSVARAMLRFVTVTAEALRFRQIQRGFRTTLDDLSGRSYVMTAEDVDLTLNWGRLSSVLPDYHGQDSVRVGRISFGSINAILGSVALILNSHHHASRVAR

SEQ ID NO: 239 - protein, 512 aa, Artificial Sequence
  Synthetic polypeptide
QVQLVQSGAEVKKPGSSVKVSCKASGYAFSYSWINWVRQAPGQGLEWMGRIFPGDGDTDYNGKFKGRVTITADKSTSTAYMELSSLRSEDTAVYYCARNVFDGYWLVYWGQGTLVTVSSGGGGSDIVMTQTPLSLPVTPGEPASISCRSSKSLLHSNGITYLYWYLQKPGQSPQLLIYQMSNLVSGVPDRFSGSGSGTDFTLKISRVEAEDVGVYYCAQNLELPYTFGGGTKVEIKEFPKPSTPPGSSGGAPGILGFVFTLKEFTLDFSTAKTYVDSLNVIRSAIGTPLQTISSGGTSLLMIDSGTGDNLFAVDVRGIDPEEGRFNNLRLIVERNNLYVTGFVNRTNNVFYRFADFSHVTFPGTTAVTLSGDSSYTTLQRVAGISRTGMQINRHSLTTSYLDLMSHSGTSLTQSVARAMLRFVTVTAEALRFRQIQRGFRTTLDDLSGRSYVMTAEDVDLTLNWGRLSSVLPDYHGQDSVRVGRISFGSINAILGSVALILNSHHHASRVAR

SEQ ID NO: 240 - protein, 508 aa, Artificial Sequence
  Synthetic polypeptide
QVQLVQSGAEVKKPGSSVKVSCKASGYAFSYSWINWVRQAPGQGLEWMGRIFPGDGDTDYNGKFKGRVTITADKSTSTAYMELSSLRSEDTAVYYCARNVFDGYWLVYWGQGTLVTVSSGGGGSDIVMTQTPLSLPVTPGEPASISCRSSKSLLHSNGITYLYWYLQKPGQSPQLLIYQMSNLVSGVPDRFSGSGSGTDFTLKISRVEAEDVGVYYCAQNLELPYTFGGGTKVEIKEFPKPSTPPGSSGGAPGILGFVFTLKEFTLDFSTAKTYVDSLNVIRSAIGTPLQTISSGGTSLLMIDSGSGDNLFAVDVRGIAPEEGRFNNLRLIVERNNLYVTGFVNRTNNVFYRFADFSHVTFPGTTAVTLSADSSYTTLQRVAGISRTGMQINRHSLTTSYLDLMSHSATSLTQSVARAMLRFVTVTAEALRFRQIQRGFRTTLDDLSGASYVMTAEDVDLTLNWGRLSSVLPDYHGQDSVRVGRISFGSINAILGSVALILNSHHHAS

SEQ ID NO: 241 - protein, 503 aa, Artificial Sequence
  Synthetic polypeptide
QVQLVQSGAEVKKPGSSVKVSCKASGYAFSYSWINWVRQAPGQGLEWMGRIFPGDGDTDYNGKFKGRVTITADKSTSTAYMELSSLRSEDTAVYYCARNVFDGYWLVYWGQGTLVTVSSGGGGSDIVMTQTPLSLPVTPGEPASISCRSSKSLLHSNGITYLYWYLQKPGQSPQLLIYQMSNLVSGVPDRFSGSGSGTDFTLKISRVEAEDVGVYYCAQNLELPYTFGGGTKVEIKEFPKPSTPPGSSGGAPKEFTLDFSTAKTYVDSLNVIRSAIGTPLQTISSGGTSLLMIDNLVPMVATVVDVRGIDPEEGRFNNLRLIVERNNLYVTGFVNRTNNVFYRFADFSHVTFPGTTAVTLSGDSSYTTLQRVAGISRTGMQINRHSLTTSYLDLMSHSGTSLTQSVARAMLRFVTVTAEALRFRQIQRGFRTTLDDLSGRSYVMTAEDVDLTLNWGRLSSVLPDYHGQDSVRVGRISFGSINAILGSVALILNSHHHASRVAR

SEQ ID NO: 242 - protein, 500 aa, Artificial Sequence
  Synthetic polypeptide
QVQLVQSGAEVKKPGSSVKVSCKASGYAFSYSWINWVRQAPGQGLEWMGRIFPGDGDTDYNGKFKGRVTITADKSTSTAYMELSSLRSEDTAVYYCARNVFDGYWLVYWGQGTLVTVSSGSTSGSGKPGSGEGSDIVMTQTPLSLPVTPGEPASISCRSSKSLLHSNGITYLYWYLQKPGQSPQLLIYQMSNLVSGVPDRFSGSGSGTDFTLKISRVEAEDVGVYYCAQNLELPYTFGGGTKVEIKGGGGSGGKEFTLDFSTAKTYVDSLNVIRSAIGTPLQTISSGGTSLLMIDSGSGDNLFAVDVRGIDPEEGRFNNLRLIVERNNLYVTGFVNRTNNVFYRFADFSHVTFPGTTAVTLSGDSSYTTLQRVAGISRTGMQINRHSLTTSYLDLMSHSGTSLTQSVARAMLRFVTVTAEALRFRQIQRGFRTTLDDLSGRSYVMTAEDVDLTLNWGRLSSVLPDYHGQDSVRVGRISFGSINAILGSVALILNSHHHAS

SEQ ID NO: 243 - protein, 513 aa, Artificial Sequence
  Synthetic polypeptide
DIVMTQTPLSLPVTPGEPASISCRSSKSLLHSNGITYLYWYLQKPGQSPQLLIYQMSNLVSGVPDRFSGSGSGTDFTLKISRVEAEDVGVYYCAQNLELPYTFGGGTKVEIKGSTSGSGKPGSGEGSQVQLVQSGAEVKKPGSSVKVSCKASGYAFSYSWINWVRQAPGQGLEWMGRIFPGDGDTDYNGKFKGRVTITADKSTSTAYMELSSLRSEDTAVYYCARNVFDGYWLVYWGQGTLVTVSSEFPKPSTPPGSSGGAPKEFTLDFSTAKTYVDSLNVIRSAIGTPLQTISSGGTSLLMIDSGSGDNLFAVDVRGIDPEEGRFNNLRLIVERNNLYVTGFVNRTNNVFYRFADFSHVTFPGTTAVTLSGDSSYTTLQRVAGISRTGMQINRHSLTTSYLDLMSHSGTSLTQSVARAMLRFVTVTAEALRFRQIQRGFRTTLDDLSGRSYVMTAEDVDLTLNWGRLSSVLPDYHGQDSVRVGRISFGSINAILGSVALILNSHHHASRVAR

SEQ ID NO: 244 - protein, 516 aa, Artificial Sequence
  Synthetic polypeptide
DIVMTQTPLSLPVTPGEPASISCRSSKSLLHSNGITYLYWYLQKPGQSPQLLIYQMSNLVSGVPDRFSGSGSGTDFTLKISRVEAEDVGVYYCAQNLELPYTFGGGTKVEIKGGGGSQVQLVQSGAEVKKPGSSVKVSCKASGYAFSYSWINWVRQAPGQGLEWMGRIFPGDGDTDYNGKFKGRVTITADKSTSTAYMELSSLRSEDTAVYYCARNVFDGYWLVYWGQGTLVTVSSEFPKPSTPPGSSGGAPGILGFVFTLKEFTLDFSTAKTYVDSLNVIRSAIGTPLQTISSGGTSLLMIDSGSGDNLFAVDVRGIDPEEGRFNNLRLIVERNNLYVTGFVNRTNNVFYRFADFSHVTFPGTTAVTLSGDSSYTTLQRVAGISRTGMQINRHSLTTSYLDLMSHSGTSLTQSVARAMLRFVTVTAEALRFRQIQRGFRTTLDDLSGRSYVMTAEDVDLTLNWGRLSSVLPDYHGQDSVRVGRISFGSINAILGSVALILNSHHHASRVARKDEL

SEQ ID NO: 245 - protein, 522 aa, Artificial Sequence
  Synthetic polypeptide
DIVMTQTPLSLPVTPGEPASISCRSSKSLLHSNGITYLYWYLQKPGQSPQLLIYQMSNLVSGVPDRFSGSGSGTDFTLKISRVEAEDVGVYYCAQNLELPYTFGGGTKVEIKGSTSGSGKPGSGEGSQVQLVQSGAEVKKPGSSVKVSCKASGYAFSYSWINWVRQAPGQGLEWMGRIFPGDGDTDYNGKFKGRVTITADKSTSTAYMELSSLRSEDTAVYYCARNVFDGYWLVYWGQGTLVTVSSEFPKPSTPPGSSGGAPGILGFVFTLKEFTLDFSTAKTYVDSLNVIRSAIGTPLQTISSGGTSLLMIDSGTGDNLFAVDVRGIDPEEGRFNNLRLIVERNNLYVTGFVNRTNNVFYRFADFSHVTFPGTTAVTLSGDSSYTTLQRVAGISRTGMQINRHSLTTSYLDLMSHSGTSLTQSVARAMLRFVTVTAEALRFRQIQRGFRTTLDDLSGRSYVMTAEDVDLTLNWGRLSSVLPDYHGQDSVRVGRISFGSINAILGSVALILNSHHHASRVAR

SEQ ID NO: 246 - protein, 522 aa, Artificial Sequence
  Synthetic polypeptide
DIVMTQTPLSLPVTPGEPASISCRSSKSLLHSNGITYLYWYLQKPGQSPQLLIYQMSNLVSGVPDRFSGSGSGTDFTLKISRVEAEDVGVYYCAQNLELPYTFGGGTKVEIKGSTSGSGKPGSGEGSQVQLVQSGAEVKKPGSSVKVSCKASGYAFSYSWINWVRQAPGQGLEWMGRIFPGDGDTDYNGKFKGRVTITADKSTSTAYMELSSLRSEDTAVYYCARNVFDGYWLVYWGQGTLVTVSSEFPKPSTPPGSSGGAPGILGFVFTLKEFTLDFSTAKTYVDSLNVIRSAIGTPLQTISSGGTSLLMIDSGSGDNLFAVDVRGIAPEEGRFNNLRLIVERNNLYVTGFVNRTNNVFYRFADFSHVTFPGTTAVTLSADSSYTTLQRVAGISRTGMQINRHSLTTSYLDLMSHSATSLTQSVARAMLRFVTVTAEALRFRQIQRGFRTTLDDLSGASYVMTAEDVDLTLNWGRLSSVLPDYHGQDSVRVGRISFGSINAILGSVALILNSHHHASRVAR

SEQ ID NO: 247 - protein, 503 aa, Artificial Sequence
  Synthetic polypeptide
DIVMTQTPLSLPVTPGEPASISCRSSKSLLHSNGITYLYWYLQKPGQSPQLLIYQMSNLVSGVPDRFSGSGSGTDFTLKISRVEAEDVGVYYCAQNLELPYTFGGGTKVEIKGGGGSQVQLVQSGAEVKKPGSSVKVSCKASGYAFSYSWINWVRQAPGQGLEWMGRIFPGDGDTDYNGKFKGRVTITADKSTSTAYMELSSLRSEDTAVYYCARNVFDGYWLVYWGQGTLVTVSSEFPKPSTPPGSSGGAPKEFTLDFSTAKTYVDSLNVIRSAIGTPLQTISSGGTSLLMIDNLVPMVATVVDVRGIDPEEGRFNNLRLIVERNNLYVTGFVNRTNNVFYRFADFSHVTFPGTTAVTLSGDSSYTTLQRVAGISRTGMQINRHSLTTSYLDLMSHSGTSLTQSVARAMLRFVTVTAEALRFRQIQRGFRTTLDDLSGRSYVMTAEDVDLTLNWGRLSSVLPDYHGQDSVRVGRISFGSINAILGSVALILNSHHHASRVAR

SEQ ID NO: 248 - protein, 514 aa, Artificial Sequence
  Synthetic polypeptide
DIVMTQTPLSLPVTPGEPASISCRSSKSLLHSNGITYLYWYLQKPGQSPQLLIYQMSNLVSGVPDRFSGSGSGTDFTLKISRVEAEDVGVYYCAQNLELPYTFGGGTKVEIKGGGGSGGGGSGGGGSGGGGSGGGGSQVQLVQSGAEVKKPGSSVKVSCKASGYAFSYSWINWVRQAPGQGLEWMGRIFPGDGDTDYNGKFKGRVTITADKSTSTAYMELSSLRSEDTAVYYCARNVFDGYWLVYWGQGTLVTVSSGGGGSGGKEFTLDFSTAKTYVDSLNVIRSAIGTPLQTISSGGTSLLMIDSGSGDNLFAVDVRGIDPEEGRFNNLRLIVERNNLYVTGFVNRTNNVFYRFADFSHVTFPGTTAVTLSGDSSYTTLQRVAGISRTGMQINRHSLTTSYLDLMSHSGTSLTQSVARAMLRFVTVTAEALRFRQIQRGFRTTLDDLSGRSYVMTAEDVDLTLNWGRLSSVLPDYHGQDSVRVGRISFGSINAILGSVALILNSHHHASAVAA

SEQ ID NO: 249 - protein, 520 aa, Artificial Sequence
  Synthetic polypeptide
KEFTLDFSTAKTYVDSLNVIRSAIGTPLQTISSGGTSLLMIDSGSGDNLFAVDVRGIDPEEGRFNNLRLIVERNNLYVTGFVNRTNNVFYRFADFSHVTFPGTTAVTLSGDSSYTTLQRVAGISRTGMQINRHSLTTSYLDLMSHSGTSLTQSVARAMLRFVTVTAEALRFRQIQRGFRTTLDDLSGRSYVMTAEDVDLTLNWGRLSSVLPDYHGQDSVRVGRISFGSINAILGSVALILNSHHHASRVAREFPKPSTPPGSSGGAPQAYLQQSGAELVRPGASVKMSCKASGYTFTSYNMHWVKQTPRQGLEWIGAIYPGNGDTSYNQKFKGKATLTVDKSSSTAYMQLSSLTSEDSAVYFCARVVYYSNSYWYFDVWGTGTTVTVSGGGGSGGGGSGGGGSGGGGSGGGGSQIVLSQSPAILSASPGEKVTMTCRASSSVSYMHWYQQKPGSSPKPWIYAPSNLASGVPARFSGSGSGTSYSLTISRVEAEDAATYYCQQWSFNPPTFGAGTKLELKS

SEQ ID NO: 250 - protein, 510 aa, Artificial Sequence
  Synthetic polypeptide
KEFTLDFSTAKTYVDSLNVIRSAIGTPLQTISSGGTSLLMIDSGSGDNLFAVDVRGIDPEEGRFNNLRLIVERNNLYVTGFVNRTNNVFYRFADFSHVTFPGTTAVTLSGDSSYTTLQRVAGISRTGMQINRHSLTTSYLDLMSHSGTSLTQSVARAMLRFVTVTAEALRFRQIQRGFRTTLDDLSGRSYVMTAEDVDLTLNWGRLSSVLPDYHGQDSVRVGRISFGSINAILGSVALILNSHHHASRVAREFPKPSTPPGSSGGAPQAYLQQSGAELVRPGASVKMSCKASGYTFTSYNMHWVKQTPRQGLEWIGAIYPGNGDTSYNQKFKGKATLTVDKSSSTAYMQLSSLTSEDSAVYFCARVVYYSNSYWYFDVWGTGTTVTVSGSTSGSGKPGSGEGSQIVLSQSPAILSASPGEKVTMTCRASSSVSYMHWYQQKPGSSPKPWIYAPSNLASGVPARFSGSGSGTSYSLTISRVEAEDAATYYCQQWSFNPPTFGAGTKLELKS

SEQ ID NO: 251 - protein, 500 aa, Artificial Sequence
  Synthetic polypeptide
KEFTLDFSTAKTYVDSLNVIRSAIGTPLQTISSGGTSLLMIDSGTGDNLFAVDVRGIAPEEGRFNNLRLIVERNNLYVTGFVNRTNNVFYRFADFSHVTFPGTTAVTLSADSSYTTLQRVAGISRTGMQINRHSLTTSYLDLMSHSATSLTQSVARAMLRFVTVTAEALRFRQIQRGFRTTLDDLSGASYVMTAEDVDLTLNWGRLSSVLPDYHGQDSVRVGRISFGSINAILGSVALILNSHHHASRVAREFPKPSTPPGSSGGAPQAYLQQSGAELVRPGASVKMSCKASGYTFTSYNMHWVKQTPRQGLEWIGAIYPGNGDTSYNQKFKGKATLTVDKSSSTAYMQLSSLTSEDSAVYFCARVVYYSNSYWYFDVWGTGTTVTVSGGGGSQIVLSQSPAILSASPGEKVTMTCRASSSVSYMHWYQQKPGSSPKPWIYAPSNLASGVPARFSGSGSGTSYSLTISRVEAEDAATYYCQQWSFNPPTFGAGTKLELKS

SEQ ID NO: 252 - protein, 511 aa, Artificial Sequence
  Synthetic polypeptide
KEFTLDFSTAKTYVDSLNVIRSAIGTPLQTISSGGTSLLMIDSGSGDNLFAVDVRGIAPEEGRFNNLRLIVERNNLYVTGFVNRTNNVFYRFADFSHVTFPGTTAVTLSADSSYTTLQRVAGISRTGMQINRHSLTTSYLDLMSHSATSLTQSVARAMLRFVTVTAEALRFRQIQRGFRTTLDDLSGASYVMTAEDVDLTLNWGRLSSVLPDYHGQDSVRVGRISFGSINAILGSVALILNSHHHASRVARGGGGSGGQAYLQQSGAELVRPGASVKMSCKASGYTFTSYNMHWVKQTPRQGLEWIGAIYPGNGDTSYNQKFKGKATLTVDKSSSTAYMQLSSLTSEDSAVYFCARVVYYSNSYWYFDVWGTGTTVTVSGGGGSGGGGSGGGGSGGGGSGGGGSQIVLSQSPAILSASPGEKVTMTCRASSSVSYMHWYQQKPGSSPKPWIYAPSNLASGVPARFSGSGSGTSYSLTISRVEAEDAATYYCQQWSFNPPTFGAGTKLELKS

SEQ ID NO: 253 - protein, 501 aa, Artificial Sequence
  Synthetic polypeptide
KEFTLDFSTAKTYVDSLNVIRSAIGTPLQTISSGGTSLLMIDNLVPMVATVVDVRGIDPEEGRFNNLRLIVERNNLYVTGFVNRTNNVFYRFADFSHVTFPGTTAVTLSGDSSYTTLQRVAGISRTGMQINRHSLTTSYLDLMSHSGTSLTQSVARAMLRFVTVTAEALRFRQIQRGFRTTLDDLSGRSYVMTAEDVDLTLNWGRLSSVLPDYHGQDSVRVGRISFGSINAILGSVALILNSHHHASRVARGGGGSGGQAYLQQSGAELVRPGASVKMSCKASGYTFTSYNMHWVKQTPRQGLEWIGAIYPGNGDTSYNQKFKGKATLTVDKSSSTAYMQLSSLTSEDSAVYFCARVVYYSNSYWYFDVWGTGTTVTVSGSTSGSGKPGSGEGSQIVLSQSPAILSASPGEKVTMTCRASSSVSYMHWYQQKPGSSPKPWIYAPSNLASGVPARFSGSGSGTSYSLTISRVEAEDAATYYCQQWSFNPPTFGAGTKLELKS

SEQ ID NO: 254 - protein, 521 aa, Artificial Sequence
  Synthetic polypeptide
KEFTLDFSTAKTYVDSLNVIRSAIGTPLQTISSGGTSLLMIDSGSGDNLFAVDVRGIDPEEGRFNNLRLIVERNNLYVTGFVNRTNNVFYRFADFSHVTFPGTTAVTLSGDSSYTTLQRVAGISRTGMQINRHSLTTSYLDLMSHSGTSLTQSVARAMLRFVTVTAEALRFRQIQRGFRTTLDDLSGRSYVMTAEDVDLTLNWGRLSSVLPDYHGQDSVRVGRISFGSINAILGSVALILNSHHHASRVAREFPKPSTPPGSSGGAPQVQLQQPGAELVKPGASVKMSCKTSGYTFTSYNVHWVKQTPGQGLEWIGAIYPGNGDTSFNQKFKGKATLTADKSSSTVYMQLSSLTSEDSAVYYCARSNYYGSSYVWFFDVWGAGTTVTVSSGGGGSGGGGSGGGGSGGGGSGGGGSQIVLSQSPTILSASPGEKVTMTCRASSSVSYMDWYQQKPGSSPKPWIYATSNLASGVPARFSGSGSGTSYSLTISRVEAEDAATYYCQQWISNPPTFGAGTKLELK

SEQ ID NO: 255 - protein, 511 aa, Artificial Sequence
  Synthetic polypeptide
KEFTLDFSTAKTYVDSLNVIRSAIGTPLQTISSGGTSLLMIDSGSGDNLFAVDVRGIDPEEGRFNNLRLIVERNNLYVTGFVNRTNNVFYRFADFSHVTFPGTTAVTLSGDSSYTTLQRVAGISRTGMQINRHSLTTSYLDLMSHSGTSLTQSVARAMLRFVTVTAEALRFRQIQRGFRTTLDDLSGRSYVMTAEDVDLTLNWGRLSSVLPDYHGQDSVRVGRISFGSINAILGSVALILNSHHHASRVAREFPKPSTPPGSSGGAPQVQLQQPGAELVKPGASVKMSCKTSGYTFTSYNVHWVKQTPGQGLEWIGAIYPGNGDTSFNQKFKGKATLTADKSSSTVYMQLSSLTSEDSAVYYCARSNYYGSSYVWFFDVWGAGTTVTVSSGSTSGSGKPGSGEGSQIVLSQSPTILSASPGEKVTMTCRASSSVSYMDWYQQKPGSSPKPWIYATSNLASGVPARFSGSGSGTSYSLTISRVEAEDAATYYCQQWISNPPTFGAGTKLELK

SEQ ID NO: 256 - protein, 501 aa, Artificial Sequence
  Synthetic polypeptide
KEFTLDFSTAKTYVDSLNVIRSAIGTPLQTISSGGTSLLMIDSGSGDNLFAVDVRGIDPEEGRFNNLRLIVERNNLYVTGFVNRTNNVFYRFADFSHVTFPGTTAVTLSGDSSYTTLQRVAGISRTGMQINRHSLTTSYLDLMSHSGTSLTQSVARAMLRFVTVTAEALRFRQIQRGFRTTLDDLSGRSYVMTAEDVDLTLNWGRLSSVLPDYHGQDSVRVGRISFGSINAILGSVALILNSHHHASRVAREFPKPSTPPGSSGGAPQVQLQQPGAELVKPGASVKMSCKTSGYTFTSYNVHWVKQTPGQGLEWIGAIYPGNGDTSFNQKFKGKATLTADKSSSTVYMQLSSLTSEDSAVYYCARSNYYGSSYVWFFDVWGAGTTVTVSSGGGGSQIVLSQSPTILSASPGEKVTMTCRASSSVSYMDWYQQKPGSSPKPWIYATSNLASGVPARFSGSGSGTSYSLTISRVEAEDAATYYCQQWISNPPTFGAGTKLELK

SEQ ID NO: 257 - protein, 512 aa, Artificial Sequence
  Synthetic polypeptide
KEFTLDFSTAKTYVDSLNVIRSAIGTPLQTISSGGTSLLMIDSGSGDNLFAVDVRGIDPEEGRFNNLRLIVERNNLYVTGFVNRTNNVFYRFADFSHVTFPGTTAVTLSGDSSYTTLQRVAGISRTGMQINRHSLTTSYLDLMSHSGTSLTQSVARAMLRFVTVTAEALRFRQIQRGFRTTLDDLSGRSYVMTAEDVDLTLNWGRLSSVLPDYHGQDSVRVGRISFGSINAILGSVALILNSHHHASRVARGGGGSGGQVQLQQPGAELVKPGASVKMSCKTSGYTFTSYNVHWVKQTPGQGLEWIGAIYPGNGDTSFNQKFKGKATLTADKSSSTVYMQLSSLTSEDSAVYYCARSNYYGSSYVWFFDVWGAGTTVTVSSGGGGSGGGGSGGGGSGGGGSGGGGSQIVLSQSPTILSASPGEKVTMTCRASSSVSYMDWYQQKPGSSPKPWIYATSNLASGVPARFSGSGSGTSYSLTISRVEAEDAATYYCQQWISNPPTFGAGTKLELK

SEQ ID NO: 258 - protein, 502 aa, Artificial Sequence
  Synthetic polypeptide
KEFTLDFSTAKTYVDSLNVIRSAIGTPLQTISSGGTSLLMIDSGSGDNLFAVDVRGIDPEEGRFNNLRLIVERNNLYVTGFVNRTNNVFYRFADFSHVTFPGTTAVTLSGDSSYTTLQRVAGISRTGMQINRHSLTTSYLDLMSHSGTSLTQSVARAMLRFVTVTAEALRFRQIQRGFRTTLDDLSGRSYVMTAEDVDLTLNWGRLSSVLPDYHGQDSVRVGRISFGSINAILGSVALILNSHHHASRVARGGGGSGGQVQLQQPGAELVKPGASVKMSCKTSGYTFTSYNVHWVKQTPGQGLEWIGAIYPGNGDTSFNQKFKGKATLTADKSSSTVYMQLSSLTSEDSAVYYCARSNYYGSSYVWFFDVWGAGTTVTVSSGSTSGSGKPGSGEGSQIVLSQSPTILSASPGEKVTMTCRASSSVSYMDWYQQKPGSSPKPWIYATSNLASGVPARFSGSGSGTSYSLTISRVEAEDAATYYCQQWISNPPTFGAGTKLELK

SEQ ID NO: 259 - protein, 492 aa, Artificial Sequence
  Synthetic polypeptide
KEFTLDFSTAKTYVDSLNVIRSAIGTPLQTISSGGTSLLMIDSGTGDNLFAVDVRGIDPEEGRFNNLRLIVERNNLYVTGFVNRTNNVFYRFADFSHVTFPGTTAVTLSGDSSYTTLQRVAGISRTGMQINRHSLTTSYLDLMSHSGTSLTQSVARAMLRFVTVTAEALRFRQIQRGFRTTLDDLSGRSYVMTAEDVDLTLNWGRLSSVLPDYHGQDSVRVGRISFGSINAILGSVALILNSHHHASRVARGGGGSGGQVQLQQPGAELVKPGASVKMSCKTSGYTFTSYNVHWVKQTPGQGLEWIGAIYPGNGDTSFNQKFKGKATLTADKSSSTVYMQLSSLTSEDSAVYYCARSNYYGSSYVWFFDVWGAGTTVTVSSGGGGSQIVLSQSPTILSASPGEKVTMTCRASSSVSYMDWYQQKPGSSPKPWIYATSNLASGVPARFSGSGSGTSYSLTISRVEAEDAATYYCQQWISNPPTFGAGTKLELK

SEQ ID NO: 260 - protein, 517 aa, Artificial Sequence
  Synthetic polypeptide
KEFTLDFSTAKTYVDSLNVIRSAIGTPLQTISSGGTSLLMIDSGSGDNLFAVDVRGIAPEEGRFNNLRLIVERNNLYVTGFVNRTNNVFYRFADFSHVTFPGTTAVTLSADSSYTTLQRVAGISRTGMQINRHSLTTSYLDLMSHSATSLTQSVARAMLRFVTVTAEALRFRQIQRGFRTTLDDLSGASYVMTAEDVDLTLNWGRLSSVLPDYHGQDSVRVGRISFGSINAILGSVALILNSHHHASEFPKPSTPPGSSGGAPQVQLQQPGAELVKPGASVKMSCKTSGYTFTSYNVHWVKQTPGQGLEWIGAIYPGNGDTSFNQKFKGKATLTADKSSSTVYMQLSSLTSEDSAVYYCARSNYYGSSYVWFFDVWGAGTTVTVSSGGGGSGGGGSGGGGSGGGGSGGGGSQIVLSQSPTILSASPGEKVTMTCRASSSVSYMDWYQQKPGSSPKPWIYATSNLASGVPARFSGSGSGTSYSLTISRVEAEDAATYYCQQWISNPPTFGAGTKLELK

SEQ ID NO: 261 - protein, 511 aa, Artificial Sequence
  Synthetic polypeptide
KEFTLDFSTAKTYVDSLNVIRSAIGTPLQTISSGGTSLLMIDNLVPMVATVVDVRGIDPEEGRFNNLRLIVERNNLYVTGFVNRTNNVFYRFADFSHVTFPGTTAVTLSGDSSYTTLQRVAGISRTGMQINRHSLTTSYLDLMSHSGTSLTQSVARAMLRFVTVTAEALRFRQIQRGFRTTLDDLSGRSYVMTAEDVDLTLNWGRLSSVLPDYHGQDSVRVGRISFGSINAILGSVALILNSHHHASRVAREFPKPSTPPGSSGGAPQVQLQQPGAELVKPGASVKMSCKTSGYTFTSYNVHWVKQTPGQGLEWIGAIYPGNGDTSFNQKFKGKATLTADKSSSTVYMQLSSLTSEDSAVYYCARSNYYGSSYVWFFDVWGAGTTVTVSSGSTSGSGKPGSGEGSQIVLSQSPTILSASPGEKVTMTCRASSSVSYMDWYQQKPGSSPKPWIYATSNLASGVPARFSGSGSGTSYSLTISRVEAEDAATYYCQQWISNPPTFGAGTKLELK

SEQ ID NO: 262 - protein, 524 aa, Artificial Sequence
  Synthetic polypeptide
KEFTLDFSTAKTYVDSLNVIRSAIGTPLQTISSGGTSLLMIDSGSGDNLFAVDVRGIDPEEGRFNNLRLIVERNNLYVTGFVNRTNNVFYRFADFSHVTFPGTTAVTLSGDSSYTTLQRVAGISRTGMQINRHSLTTSYLDLMSHSGTSLTQSVARAMLRFVTVTAEALRFRQIQRGFRTTLDDLSGRSYVMTAEDVDLTLNWGRLSSVLPDYHGQDSVRVGRISFGSINAILGSVALILNSHHHASRVAREFPKPSTPPGSSGGAPQVQLQQPGAELVKPGASVKMSCKTSGYTFTSYNVHWVKQTPGQGLEWIGAIYPGNGDTSFNQKFKGKATLTADKSSSTVYMQLSSLTSEDSAVYYCARSNYYGSSYVWFFDVWGAGTTVTVSSGGGGSGGGGSGGGGSGGGGSGGGGSQIVLSQSPTILSASPGEKVTMTCRASSSVSYMDWYQQKPGSSPKPWIYATSNLASGVPARFSGSGSGTSYSLTISRVEAEDAATYYCQQWISNPPTFGAGTKLELKDEL

SEQ ID NO: 263 - protein, 514 aa, Artificial Sequence
  Synthetic polypeptide
KEFTLDFSTAKTYVDSLNVIRSAIGTPLQTISSGGTSLLMIDSGSGDNLFAVDVRGIDPEEGRFNNLRLIVERNNLYVTGFVNRTNNVFYRFADFSHVTFPGTTAVTLSGDSSYTTLQRVAGISRTGMQINRHSLTTSYLDLMSHSGTSLTQSVARAMLRFVTVTAEALRFRQIQRGFRTTLDDLSGRSYVMTAEDVDLTLNWGRLSSVLPDYHGQDSVRVGRISFGSINAILGSVALILNSHHHASRVAREFPKPSTPPGSSGGAPQVQLQQPGAELVKPGASVKMSCKTSGYTFTSYNVHWVKQTPGQGLEWIGAIYPGNGDTSFNQKFKGKATLTADKSSSTVYMQLSSLTSEDSAVYYCARSNYYGSSYVWFFDVWGAGTTVTVSSGSTSGSGKPGSGEGSQIVLSQSPTILSASPGEKVTMTCRASSSVSYMDWYQQKPGSSPKPWIYATSNLASGVPARFSGSGSGTSYSLTISRVEAEDAATYYCQQWISNPPTFGAGTKLELKDEL

SEQ ID NO: 264 - protein, 504 aa, Artificial Sequence
  Synthetic polypeptide
KEFTLDFSTAKTYVDSLNVIRSAIGTPLQTISSGGTSLLMIDSGSGDNLFAVDVRGIDPEEGRFNNLRLIVERNNLYVTGFVNRTNNVFYRFADFSHVTFPGTTAVTLSGDSSYTTLQRVAGISRTGMQINRHSLTTSYLDLMSHSGTSLTQSVARAMLRFVTVTAEALRFRQIQRGFRTTLDDLSGRSYVMTAEDVDLTLNWGRLSSVLPDYHGQDSVRVGRISFGSINAILGSVALILNSHHHASRVAREFPKPSTPPGSSGGAPQVQLQQPGAELVKPGASVKMSCKTSGYTFTSYNVHWVKQTPGQGLEWIGAIYPGNGDTSFNQKFKGKATLTADKSSSTVYMQLSSLTSEDSAVYYCARSNYYGSSYVWFFDVWGAGTTVTVSSGGGGSQIVLSQSPTILSASPGEKVTMTCRASSSVSYMDWYQQKPGSSPKPWIYATSNLASGVPARFSGSGSGTSYSLTISRVEAEDAATYYCQQWISNPPTFGAGTKLELKDEL

SEQ ID NO: 265 - protein, 515 aa, Artificial Sequence
  Synthetic polypeptide
KEFTLDFSTAKTYVDSLNVIRSAIGTPLQTISSGGTSLLMIDSGSGDNLFAVDVRGIDPEEGRFNNLRLIVERNNLYVTGFVNRTNNVFYRFADFSHVTFPGTTAVTLSGDSSYTTLQRVAGISRTGMQINRHSLTTSYLDLMSHSGTSLTQSVARAMLRFVTVTAEALRFRQIQRGFRTTLDDLSGRSYVMTAEDVDLTLNWGRLSSVLPDYHGQDSVRVGRISFGSINAILGSVALILNSHHHASRVARGGGGSGGQVQLQQPGAELVKPGASVKMSCKTSGYTFTSYNVHWVKQTPGQGLEWIGAIYPGNGDTSFNQKFKGKATLTADKSSSTVYMQLSSLTSEDSAVYYCARSNYYGSSYVWFFDVWGAGTTVTVSSGGGGSGGGGSGGGGSGGGGSGGGGSQIVLSQSPTILSASPGEKVTMTCRASSSVSYMDWYQQKPGSSPKPWIYATSNLASGVPARFSGSGSGTSYSLTISRVEAEDAATYYCQQWISNPPTFGAGTKLELKDEL

SEQ ID NO: 266 - protein, 505 aa, Artificial Sequence
  Synthetic polypeptide
KEFTLDFSTAKTYVDSLNVIRSAIGTPLQTISSGGTSLLMIDSGSGDNLFAVDVRGIDPEEGRFNNLRLIVERNNLYVTGFVNRTNNVFYRFADFSHVTFPGTTAVTLSGDSSYTTLQRVAGISRTGMQINRHSLTTSYLDLMSHSGTSLTQSVARAMLRFVTVTAEALRFRQIQRGFRTTLDDLSGRSYVMTAEDVDLTLNWGRLSSVLPDYHGQDSVRVGRISFGSINAILGSVALILNSHHHASRVARGGGGSGGQVQLQQPGAELVKPGASVKMSCKTSGYTFTSYNVHWVKQTPGQGLEWIGAIYPGNGDTSFNQKFKGKATLTADKSSSTVYMQLSSLTSEDSAVYYCARSNYYGSSYVWFFDVWGAGTTVTVSSGSTSGSGKPGSGEGSQIVLSQSPTILSASPGEKVTMTCRASSSVSYMDWYQQKPGSSPKPWIYATSNLASGVPARFSGSGSGTSYSLTISRVEAEDAATYYCQQWISNPPTFGAGTKLELKDEL

SEQ ID NO: 267 - protein, 495 aa, Artificial Sequence
  Synthetic polypeptide
KEFTLDFSTAKTYVDSLNVIRSAIGTPLQTISSGGTSLLMIDSGTGDNLFAVDVRGIDPEEGRFNNLRLIVERNNLYVTGFVNRTNNVFYRFADFSHVTFPGTTAVTLSGDSSYTTLQRVAGISRTGMQINRHSLTTSYLDLMSHSGTSLTQSVARAMLRFVTVTAEALRFRQIQRGFRTTLDDLSGRSYVMTAEDVDLTLNWGRLSSVLPDYHGQDSVRVGRISFGSINAILGSVALILNSHHHASRVARGGGGSGGQVQLQQPGAELVKPGASVKMSCKTSGYTFTSYNVHWVKQTPGQGLEWIGAIYPGNGDTSFNQKFKGKATLTADKSSSTVYMQLSSLTSEDSAVYYCARSNYYGSSYVWFFDVWGAGTTVTVSSGGGGSQIVLSQSPTILSASPGEKVTMTCRASSSVSYMDWYQQKPGSSPKPWIYATSNLASGVPARFSGSGSGTSYSLTISRVEAEDAATYYCQQWISNPPTFGAGTKLELKDEL

SEQ ID NO: 268 - protein, 520 aa, Artificial Sequence
  Synthetic polypeptide
KEFTLDFSTAKTYVDSLNVIRSAIGTPLQTISSGGTSLLMIDSGSGDNLFAVDVRGIAPEEGRFNNLRLIVERNNLYVTGFVNRTNNVFYRFADFSHVTFPGTTAVTLSADSSYTTLQRVAGISRTGMQINRHSLTTSYLDLMSHSATSLTQSVARAMLRFVTVTAEALRFRQIQRGFRTTLDDLSGASYVMTAEDVDLTLNWGRLSSVLPDYHGQDSVRVGRISFGSINAILGSVALILNSHHHASEFPKPSTPPGSSGGAPQVQLQQPGAELVKPGASVKMSCKTSGYTFTSYNVHWVKQTPGQGLEWIGAIYPGNGDTSFNQKFKGKATLTADKSSSTVYMQLSSLTSEDSAVYYCARSNYYGSSYVWFFDVWGAGTTVTVSSGGGGSGGGGSGGGGSGGGGSGGGGSQIVLSQSPTILSASPGEKVTMTCRASSSVSYMDWYQQKPGSSPKPWIYATSNLASGVPARFSGSGSGTSYSLTISRVEAEDAATYYCQQWISNPPTFGAGTKLELKDEL

SEQ ID NO: 269 - protein, 514 aa, Artificial Sequence
  Synthetic polypeptide
KEFTLDFSTAKTYVDSLNVIRSAIGTPLQTISSGGTSLLMIDNLVPMVATVVDVRGIDPEEGRFNNLRLIVERNNLYVTGFVNRTNNVFYRFADFSHVTFPGTTAVTLSGDSSYTTLQRVAGISRTGMQINRHSLTTSYLDLMSHSGTSLTQSVARAMLRFVTVTAEALRFRQIQRGFRTTLDDLSGRSYVMTAEDVDLTLNWGRLSSVLPDYHGQDSVRVGRISFGSINAILGSVALILNSHHHASRVAREFPKPSTPPGSSGGAPQVQLQQPGAELVKPGASVKMSCKTSGYTFTSYNVHWVKQTPGQGLEWIGAIYPGNGDTSFNQKFKGKATLTADKSSSTVYMQLSSLTSEDSAVYYCARSNYYGSSYVWFFDVWGAGTTVTVSSGSTSGSGKPGSGEGSQIVLSQSPTILSASPGEKVTMTCRASSSVSYMDWYQQKPGSSPKPWIYATSNLASGVPARFSGSGSGTSYSLTISRVEAEDAATYYCQQWISNPPTFGAGTKLELKDEL

SEQ ID NO: 270 - protein, 513 aa, Artificial Sequence
  Synthetic polypeptide
KEFTLDFSTAKTYVDSLNVIRSAIGTPLQTISSGGTSLLMIDSGSGDNLFAVDVRGIDPEEGRFNNLRLIVERNNLYVTGFVNRTNNVFYRFADFSHVTFPGTTAVTLSGDSSYTTLQRVAGISRTGMQINRHSLTTSYLDLMSHSGTSLTQSVARAMLRFVTVTAEALRFRQIQRGFRTTLDDLSGRSYVMTAEDVDLTLNWGRLSSVLPDYHGQDSVRVGRISFGSINAILGSVALILNSHHHASRVAREFPKPSTPPGSSGGAPQVQLVQSGAEVKKPGSSVKVSCKASGYAFSYSWINWVRQAPGQGLEWMGRIFPGDGDTDYNGKFKGRVTITADKSTSTAYMELSSLRSEDTAVYYCARNVFDGYWLVYWGQGTLVTVSSGSTSGSGKPGSGEGSDIVMTQTPLSLPVTPGEPASISCRSSKSLLHSNGITYLYWYLQKPGQSPQLLIYQMSNLVSGVPDRFSGSGSGTDFTLKISRVEAEDVGVYYCAQNLELPYTFGGGTKVEIK

SEQ ID NO: 271 - protein, 497 aa, Artificial Sequence
  Synthetic polypeptide
KEFTLDFSTAKTYVDSLNVIRSAIGTPLQTISSGGTSLLMIDSGSGDNLFAVDVRGIDPEEGRFNNLRLIVERNNLYVTGFVNRTNNVFYRFADFSHVTFPGTTAVTLSGDSSYTTLQRVAGISRTGMQINRHSLTTSYLDLMSHSGTSLTQSVARAMLRFVTVTAEALRFRQIQRGFRTTLDDLSGRSYVMTAEDVDLTLNWGRLSSVLPDYHGQDSVRVGRISFGSINAILGSVALILNSHHHASRVARGGGGSGGQVQLVQSGAEVKKPGSSVKVSCKASGYAFSYSWINWVRQAPGQGLEWMGRIFPGDGDTDYNGKFKGRVTITADKSTSTAYMELSSLRSEDTAVYYCARNVFDGYWLVYWGQGTLVTVSSGGGGSDIVMTQTPLSLPVTPGEPASISCRSSKSLLHSNGITYLYWYLQKPGQSPQLLIYQMSNLVSGVPDRFSGSGSGTDFTLKISRVEAEDVGVYYCAQNLELPYTFGGGTKVEIKDEL

SEQ ID NO: 272 - protein, 523 aa, Artificial Sequence
  Synthetic polypeptide
KEFTLDFSTAKTYVDSLNVIRSAIGTPLQTISSGGTSLLMIDSGTGDNLFAVDVRGIDPEEGRFNNLRLIVERNNLYVTGFVNRTNNVFYRFADFSHVTFPGTTAVTLSGDSSYTTLQRVAGISRTGMQINRHSLTTSYLDLMSHSGTSLTQSVARAMLRFVTVTAEALRFRQIQRGFRTTLDDLSGRSYVMTAEDVDLTLNWGRLSSVLPDYHGQDSVRVGRISFGSINAILGSVALILNSHHHASRVAREFPKPSTPPGSSGGAPQVQLVQSGAEVKKPGSSVKVSCKASGYAFSYSWINWVRQAPGQGLEWMGRIFPGDGDTDYNGKFKGRVTITADKSTSTAYMELSSLRSEDTAVYYCARNVFDGYWLVYWGQGTLVTVSSGGGGSGGGGSGGGGSGGGGSGGGGSDIVMTQTPLSLPVTPGEPASISCRSSKSLLHSNGITYLYWYLQKPGQSPQLLIYQMSNLVSGVPDRFSGSGSGTDFTLKISRVEAEDVGVYYCAQNLELPYTFGGGTKVEIK

SEQ ID NO: 273 - protein, 503 aa, Artificial Sequence
  Synthetic polypeptide
KEFTLDFSTAKTYVDSLNVIRSAIGTPLQTISSGGTSLLMIDSGSGDNLFAVDVRGIAPEEGRFNNLRLIVERNNLYVTGFVNRTNNVFYRFADFSHVTFPGTTAVTLSADSSYTTLQRVAGISRTGMQINRHSLTTSYLDLMSHSATSLTQSVARAMLRFVTVTAEALRFRQIQRGFRTTLDDLSGASYVMTAEDVDLTLNWGRLSSVLPDYHGQDSVRVGRISFGSINAILGSVALILNSHHHASRVAREFPKPSTPPGSSGGAPQVQLVQSGAEVKKPGSSVKVSCKASGYAFSYSWINWVRQAPGQGLEWMGRIFPGDGDTDYNGKFKGRVTITADKSTSTAYMELSSLRSEDTAVYYCARNVFDGYWLVYWGQGTLVTVSSGGGGSDIVMTQTPLSLPVTPGEPASISCRSSKSLLHSNGITYLYWYLQKPGQSPQLLIYQMSNLVSGVPDRFSGSGSGTDFTLKISRVEAEDVGVYYCAQNLELPYTFGGGTKVEIK

SEQ ID NO: 274 - protein, 516 aa, Artificial Sequence
  Synthetic polypeptide
KEFTLDFSTAKTYVDSLNVIRSAIGTPLQTISSGGTSLLMIDNLVPMVATVVDVRGIDPEEGRFNNLRLIVERNNLYVTGFVNRTNNVFYRFADFSHVTFPGTTAVTLSGDSSYTTLQRVAGISRTGMQINRHSLTTSYLDLMSHSGTSLTQSVARAMLRFVTVTAEALRFRQIQRGFRTTLDDLSGRSYVMTAEDVDLTLNWGRLSSVLPDYHGQDSVRVGRISFGSINAILGSVALILNSHHHASRVAREFPKPSTPPGSSGGAPQVQLVQSGAEVKKPGSSVKVSCKASGYAFSYSWINWVRQAPGQGLEWMGRIFPGDGDTDYNGKFKGRVTITADKSTSTAYMELSSLRSEDTAVYYCARNVFDGYWLVYWGQGTLVTVSSGSTSGSGKPGSGEGSDIVMTQTPLSLPVTPGEPASISCRSSKSLLHSNGITYLYWYLQKPGQSPQLLIYQMSNLVSGVPDRFSGSGSGTDFTLKISRVEAEDVGVYYCAQNLELPYTFGGGTKVEIKDEL

SEQ ID NO: 275 - protein, 513 aa, Artificial Sequence
  Synthetic polypeptide
KEFTLDFSTAKTYVDSLNVIRSAIGTPLQTISSGGTSLLMIDSGSGDNLFAVDVRGIDPEEGRFNNLRLIVERNNLYVTGFVNRTNNVFYRFADFSHVTFPGTTAVTLSGDSSYTTLQRVAGISRTGMQINRHSLTTSYLDLMSHSGTSLTQSVARAMLRFVTVTAEALRFRQIQRGFRTTLDDLSGRSYVMTAEDVDLTLNWGRLSSVLPDYHGQDSVRVGRISFGSINAILGSVALILNSHHHASRVAREFPKPSTPPGSSGGAPDIVMTQTPLSLPVTPGEPASISCRSSKSLLHSNGITYLYWYLQKPGQSPQLLIYQMSNLVSGVPDRFSGSGSGTDFTLKISRVEAEDVGVYYCAQNLELPYTFGGGTKVEIKGSTSGSGKPGSGEGSQVQLVQSGAEVKKPGSSVKVSCKASGYAFSYSWINWVRQAPGQGLEWMGRIFPGDGDTDYNGKFKGRVTITADKSTSTAYMELSSLRSEDTAVYYCARNVFDGYWLVYWGQGTLVTVSS

SEQ ID NO: 276 - protein, 514 aa, Artificial Sequence
  Synthetic polypeptide
KEFTLDFSTAKTYVDSLNVIRSAIGTPLQTISSGGTSLLMIDSGSGDNLFAVDVRGIDPEEGRFNNLRLIVERNNLYVTGFVNRTNNVFYRFADFSHVTFPGTTAVTLSGDSSYTTLQRVAGISRTGMQINRHSLTTSYLDLMSHSGTSLTQSVARAMLRFVTVTAEALRFRQIQRGFRTTLDDLSGRSYVMTAEDVDLTLNWGRLSSVLPDYHGQDSVRVGRISFGSINAILGSVALILNSHHHASRVARGGGGSGGDIVMTQTPLSLPVTPGEPASISCRSSKSLLHSNGITYLYWYLQKPGQSPQLLIYQMSNLVSGVPDRFSGSGSGTDFTLKISRVEAEDVGVYYCAQNLELPYTFGGGTKVEIKGGGGSGGGGSGGGGSGGGGSGGGGSQVQLVQSGAEVKKPGSSVKVSCKASGYAFSYSWINWVRQAPGQGLEWMGRIFPGDGDTDYNGKFKGRVTITADKSTSTAYMELSSLRSEDTAVYYCARNVFDGYWLVYWGQGTLVTVSS

SEQ ID NO: 277 - protein, 494 aa, Artificial Sequence
  Synthetic polypeptide
KEFTLDFSTAKTYVDSLNVIRSAIGTPLQTISSGGTSLLMIDSGTGDNLFAVDVRGIDPEEGRFNNLRLIVERNNLYVTGFVNRTNNVFYRFADFSHVTFPGTTAVTLSGDSSYTTLQRVAGISRTGMQINRHSLTTSYLDLMSHSGTSLTQSVARAMLRFVTVTAEALRFRQIQRGFRTTLDDLSGRSYVMTAEDVDLTLNWGRLSSVLPDYHGQDSVRVGRISFGSINAILGSVALILNSHHHASRVARGGGGSGGDIVMTQTPLSLPVTPGEPASISCRSSKSLLHSNGITYLYWYLQKPGQSPQLLIYQMSNLVSGVPDRFSGSGSGTDFTLKISRVEAEDVGVYYCAQNLELPYTFGGGTKVEIKGGGGSQVQLVQSGAEVKKPGSSVKVSCKASGYAFSYSWINWVRQAPGQGLEWMGRIFPGDGDTDYNGKFKGRVTITADKSTSTAYMELSSLRSEDTAVYYCARNVFDGYWLVYWGQGTLVTVSS

SEQ ID NO: 278 - protein, 509 aa, Artificial Sequence
  Synthetic polypeptide
KEFTLDFSTAKTYVDSLNVIRSAIGTPLQTISSGGTSLLMIDSGSGDNLFAVDVRGIAPEEGRFNNLRLIVERNNLYVTGFVNRTNNVFYRFADFSHVTFPGTTAVTLSADSSYTTLQRVAGISRTGMQINRHSLTTSYLDLMSHSATSLTQSVARAMLRFVTVTAEALRFRQIQRGFRTTLDDLSGASYVMTAEDVDLTLNWGRLSSVLPDYHGQDSVRVGRISFGSINAILGSVALILNSHHHASEFPKPSTPPGSSGGAPDIVMTQTPLSLPVTPGEPASISCRSSKSLLHSNGITYLYWYLQKPGQSPQLLIYQMSNLVSGVPDRFSGSGSGTDFTLKISRVEAEDVGVYYCAQNLELPYTFGGGTKVEIKGSTSGSGKPGSGEGSQVQLVQSGAEVKKPGSSVKVSCKASGYAFSYSWINWVRQAPGQGLEWMGRIFPGDGDTDYNGKFKGRVTITADKSTSTAYMELSSLRSEDTAVYYCARNVFDGYWLVYWGQGTLVTVSS

SEQ ID NO: 279 - protein, 513 aa, Artificial Sequence
  Synthetic polypeptide
KEFTLDFSTAKTYVDSLNVIRSAIGTPLQTISSGGTSLLMIDNLVPMVATVVDVRGIDPEEGRFNNLRLIVERNNLYVTGFVNRTNNVFYRFADFSHVTFPGTTAVTLSGDSSYTTLQRVAGISRTGMQINRHSLTTSYLDLMSHSGTSLTQSVARAMLRFVTVTAEALRFRQIQRGFRTTLDDLSGRSYVMTAEDVDLTLNWGRLSSVLPDYHGQDSVRVGRISFGSINAILGSVALILNSHHHASRVAREFPKPSTPPGSSGGAPDIVMTQTPLSLPVTPGEPASISCRSSKSLLHSNGITYLYWYLQKPGQSPQLLIYQMSNLVSGVPDRFSGSGSGTDFTLKISRVEAEDVGVYYCAQNLELPYTFGGGTKVEIKGSTSGSGKPGSGEGSQVQLVQSGAEVKKPGSSVKVSCKASGYAFSYSWINWVRQAPGQGLEWMGRIFPGDGDTDYNGKFKGRVTITADKSTSTAYMELSSLRSEDTAVYYCARNVFDGYWLVYWGQGTLVTVSS

SEQ ID NO: 280 - protein, 509 aa, Artificial Sequence
  Synthetic polypeptide
KEFTLDFSTAKTYVDSLNVIRSAIGTPLQTISSGGTSLLMIDSGSGDNLFAVDVRGIDPEEGRFNNLRLIVERNNLYVTGFVNRTNNVFYRFADFSHVTFPGTTAVTLSGDSSYTTLQRVAGISRTGMQINRHSLTTSYLDLMSHSGTSLTQSVARAMLRFVTVTAEALRFRQIQRGFRTTLDDLSGRSYVMTAEDVDLTLNWGRLSSVLPDYHGQDSVRVGRISFGSINAILGSVALILNSHHHASEFPKPSTPPGSSGGAPDIVMTQTPLSLPVTPGEPASISCRSSKSLLHSNGITYLYWYLQKPGQSPQLLIYQMSNLVSGVPDRFSGSGSGTDFTLKISRVEAEDVGVYYCAQNLELPYTFGGGTKVEIKGSTSGSGKPGSGEGSQVQLVQSGAEVKKPGSSVKVSCKASGYAFSYSWINWVRQAPGQGLEWMGRIFPGDGDTDYNGKFKGRVTITADKSTSTAYMELSSLRSEDTAVYYCARNVFDGYWLVYWGQGTLVTVSS

SEQ ID NO: 281 - protein, 510 aa, Artificial Sequence
  Synthetic polypeptide
KEFTLDFSTAKTYVDSLNVIRSAIGTPLQTISSGGTSLLMIDSGSGDNLFAVDVRGIDPEEGRFNNLRLIVERNNLYVTGFVNRTNNVFYRFADFSHVTFPGTTAVTLSGDSSYTTLQRVAGISRTGMQINRHSLTTSYLDLMSHSGTSLTQSVARAMLRFVTVTAEALRFRQIQRGFRTTLDDLSGRSYVMTAEDVDLTLNWGRLSSVLPDYHGQDSVRVGRISFGSINAILGSVALILNSHHHASRVAREFPKPSTPPGSSGGAPQIVLSQSPAILSASPGEKVTMTCRASSSVSYMHWYQQKPGSSPKPWIYAPSNLASGVPARFSGSGSGTSYSLTISRVEAEDAATYYCQQWSFNPPTFGAGTKLELKSGSTSGSGKPGSGEGSQAYLQQSGAELVRPGASVKMSCKASGYTFTSYNMHWVKQTPRQGLEWIGAIYPGNGDTSYNQKFKGKATLTVDKSSSTAYMQLSSLTSEDSAVYFCARVVYYSNSYWYFDVWGTGTTVTVS

SEQ ID NO: 282 - protein, 500 aa, Artificial Sequence
  Synthetic polypeptide
KEFTLDFSTAKTYVDSLNVIRSAIGTPLQTISSGGTSLLMIDSGSGDNLFAVDVRGIDPEEGRFNNLRLIVERNNLYVTGFVNRTNNVFYRFADFSHVTFPGTTAVTLSGDSSYTTLQRVAGISRTGMQINRHSLTTSYLDLMSHSGTSLTQSVARAMLRFVTVTAEALRFRQIQRGFRTTLDDLSGRSYVMTAEDVDLTLNWGRLSSVLPDYHGQDSVRVGRISFGSINAILGSVALILNSHHHASRVAREFPKPSTPPGSSGGAPQIVLSQSPAILSASPGEKVTMTCRASSSVSYMHWYQQKPGSSPKPWIYAPSNLASGVPARFSGSGSGTSYSLTISRVEAEDAATYYCQQWSFNPPTFGAGTKLELKSGGGGSQAYLQQSGAELVRPGASVKMSCKASGYTFTSYNMHWVKQTPRQGLEWIGAIYPGNGDTSYNQKFKGKATLTVDKSSSTAYMQLSSLTSEDSAVYFCARVVYYSNSYWYFDVWGTGTTVTVS

SEQ ID NO: 283 - protein, 510 aa, Artificial Sequence
  Synthetic polypeptide
KEFTLDFSTAKTYVDSLNVIRSAIGTPLQTISSGGTSLLMIDSGTGDNLFAVDVRGIDPEEGRFNNLRLIVERNNLYVTGFVNRTNNVFYRFADFSHVTFPGTTAVTLSGDSSYTTLQRVAGISRTGMQINRHSLTTSYLDLMSHSGTSLTQSVARAMLRFVTVTAEALRFRQIQRGFRTTLDDLSGRSYVMTAEDVDLTLNWGRLSSVLPDYHGQDSVRVGRISFGSINAILGSVALILNSHHHASRVAREFPKPSTPPGSSGGAPQIVLSQSPAILSASPGEKVTMTCRASSSVSYMHWYQQKPGSSPKPWIYAPSNLASGVPARFSGSGSGTSYSLTISRVEAEDAATYYCQQWSFNPPTFGAGTKLELKSGSTSGSGKPGSGEGSQAYLQQSGAELVRPGASVKMSCKASGYTFTSYNMHWVKQTPRQGLEWIGAIYPGNGDTSYNQKFKGKATLTVDKSSSTAYMQLSSLTSEDSAVYFCARVVYYSNSYWYFDVWGTGTTVTVS

SEQ ID NO: 284 - protein, 510 aa, Artificial Sequence
  Synthetic polypeptide
KEFTLDFSTAKTYVDSLNVIRSAIGTPLQTISSGGTSLLMIDSGSGDNLFAVDVRGIAPEEGRFNNLRLIVERNNLYVTGFVNRTNNVFYRFADFSHVTFPGTTAVTLSADSSYTTLQRVAGISRTGMQINRHSLTTSYLDLMSHSATSLTQSVARAMLRFVTVTAEALRFRQIQRGFRTTLDDLSGASYVMTAEDVDLTLNWGRLSSVLPDYHGQDSVRVGRISFGSINAILGSVALILNSHHHASRVAREFPKPSTPPGSSGGAPQIVLSQSPAILSASPGEKVTMTCRASSSVSYMHWYQQKPGSSPKPWIYAPSNLASGVPARFSGSGSGTSYSLTISRVEAEDAATYYCQQWSFNPPTFGAGTKLELKSGSTSGSGKPGSGEGSQAYLQQSGAELVRPGASVKMSCKASGYTFTSYNMHWVKQTPRQGLEWIGAIYPGNGDTSYNQKFKGKATLTVDKSSSTAYMQLSSLTSEDSAVYFCARVVYYSNSYWYFDVWGTGTTVTVS

SEQ ID NO: 285 - protein, 511 aa, Artificial Sequence
  Synthetic polypeptide
KEFTLDFSTAKTYVDSLNVIRSAIGTPLQTISSGGTSLLMIDNLVPMVATVVDVRGIDPEEGRFNNLRLIVERNNLYVTGFVNRTNNVFYRFADFSHVTFPGTTAVTLSGDSSYTTLQRVAGISRTGMQINRHSLTTSYLDLMSHSGTSLTQSVARAMLRFVTVTAEALRFRQIQRGFRTTLDDLSGRSYVMTAEDVDLTLNWGRLSSVLPDYHGQDSVRVGRISFGSINAILGSVALILNSHHHASRVARGGGGSGGQIVLSQSPAILSASPGEKVTMTCRASSSVSYMHWYQQKPGSSPKPWIYAPSNLASGVPARFSGSGSGTSYSLTISRVEAEDAATYYCQQWSFNPPTFGAGTKLELKSGGGGSGGGGSGGGGSGGGGSGGGGSQAYLQQSGAELVRPGASVKMSCKASGYTFTSYNMHWVKQTPRQGLEWIGAIYPGNGDTSYNQKFKGKATLTVDKSSSTAYMQLSSLTSEDSAVYFCARVVYYSNSYWYFDVWGTGTTVTVS

SEQ ID NO: 286 - protein, 510 aa, Artificial Sequence
  Synthetic polypeptide
KEFTLDFSTAKTYVDSLNVIRSAIGTPLQTISSGGTSLLMIDSGSGDNLFAVDVRGIDPEEGRFNNLRLIVERNNLYVTGFVNRTNNVFYRFADFSHVTFPGTTAVTLSGDSSYTTLQRVAGISRTGMQINRHSLTTSYLDLMSHSGTSLTQSVARAMLRFVTVTAEALRFRQIQRGFRTTLDDLSGRSYVMTAEDVDLTLNWGRLSSVLPDYHGQDSVRVGRISFGSINAILGSVALILNSHHHASAVAAEFPKPSTPPGSSGGAPQIVLSQSPAILSASPGEKVTMTCRASSSVSYMHWYQQKPGSSPKPWIYAPSNLASGVPARFSGSGSGTSYSLTISRVEAEDAATYYCQQWSFNPPTFGAGTKLELKSGSTSGSGKPGSGEGSQAYLQQSGAELVRPGASVKMSCKASGYTFTSYNMHWVKQTPRQGLEWIGAIYPGNGDTSYNQKFKGKATLTVDKSSSTAYMQLSSLTSEDSAVYFCARVVYYSNSYWYFDVWGTGTTVTVS

SEQ ID NO: 287 - protein, 515 aa, Artificial Sequence
  Synthetic polypeptide
KEFTLDFSTAKTYVDSLNVIRSAIGTPLQTISSGGTSLLMIDSGSGDNLFAVDVRGIDPEEGRFNNLRLIVERNNLYVTGFVNRTNNVFYRFADFSHVTFPGTTAVTLSGDSSYTTLQRVAGISRTGMQINRHSLTTSYLDLMSHSGTSLTQSVARAMLRFVTVTAEALRFRQIQRGFRTTLDDLSGRSYVMTAEDVDLTLNWGRLSSVLPDYHGQDSVRVGRISFGSINAILGSVALILNSHHHASRVAREFPKPSTPPGSSGGAPEIVLTQSPATLSLSPGERATLSCRASQSVSSYLAWYQQKPGQAPRLLIYDASNRATGIPARFSGSGSGTDFTLTISSLEPEDFAVYYCQQRSNWPITFGQGTRLEIKGSTSGSGKPGSGEGSEVQLVESGGGLVQPGRSLRLSCAASGFTFNDYAMHWVRQAPGKGLEWVSTISWNSGSIGYADSVKGRFTISRDNAKKSLYLQMNSLRAEDTALYYCAKDIQYGNYYYGMDVWGQGTTVTVSSKDEL

SEQ ID NO: 288 - protein, 512 aa, Artificial Sequence
  Synthetic polypeptide
KEFTLDFSTAKTYVDSLNVIRSAIGTPLQTISSGGTSLLMIDSGSGDNLFAVDVRGIDPEEGRFNNLRLIVERNNLYVTGFVNRTNNVFYRFADFSHVTFPGTTAVTLSGDSSYTTLQRVAGISRTGMQINRHSLTTSYLDLMSHSGTSLTQSVARAMLRFVTVTAEALRFRQIQRGFRTTLDDLSGRSYVMTAEDVDLTLNWGRLSSVLPDYHGQDSVRVGRISFGSINAILGSVALILNSHHHASRVARGGGGSGGEIVLTQSPATLSLSPGERATLSCRASQSVSSYLAWYQQKPGQAPRLLIYDASNRATGIPARFSGSGSGTDFTLTISSLEPEDFAVYYCQQRSNWPITFGQGTRLEIKGGGGSGGGGSGGGGSGGGGSGGGGSEVQLVESGGGLVQPGRSLRLSCAASGFTFNDYAMHWVRQAPGKGLEWVSTISWNSGSIGYADSVKGRFTISRDNAKKSLYLQMNSLRAEDTALYYCAKDIQYGNYYYGMDVWGQGTTVTVSS

SEQ ID NO: 289 - protein, 512 aa, Artificial Sequence
  Synthetic polypeptide
KEFTLDFSTAKTYVDSLNVIRSAIGTPLQTISSGGTSLLMIDSGTGDNLFAVDVRGIDPEEGRFNNLRLIVERNNLYVTGFVNRTNNVFYRFADFSHVTFPGTTAVTLSGDSSYTTLQRVAGISRTGMQINRHSLTTSYLDLMSHSGTSLTQSVARAMLRFVTVTAEALRFRQIQRGFRTTLDDLSGRSYVMTAEDVDLTLNWGRLSSVLPDYHGQDSVRVGRISFGSINAILGSVALILNSHHHASRVARGGGGSGGEIVLTQSPATLSLSPGERATLSCRASQSVSSYLAWYQQKPGQAPRLLIYDASNRATGIPARFSGSGSGTDFTLTISSLEPEDFAVYYCQQRSNWPITFGQGTRLEIKGGGGSGGGGSGGGGSGGGGSGGGGSEVQLVESGGGLVQPGRSLRLSCAASGFTFNDYAMHWVRQAPGKGLEWVSTISWNSGSIGYADSVKGRFTISRDNAKKSLYLQMNSLRAEDTALYYCAKDIQYGNYYYGMDVWGQGTTVTVSS

SEQ ID NO: 290 - protein, 498 aa, Artificial Sequence
  Synthetic polypeptide
KEFTLDFSTAKTYVDSLNVIRSAIGTPLQTISSGGTSLLMIDSGSGDNLFAVDVRGIAPEEGRFNNLRLIVERNNLYVTGFVNRTNNVFYRFADFSHVTFPGTTAVTLSADSSYTTLQRVAGISRTGMQINRHSLTTSYLDLMSHSATSLTQSVARAMLRFVTVTAEALRFRQIQRGFRTTLDDLSGASYVMTAEDVDLTLNWGRLSSVLPDYHGQDSVRVGRISFGSINAILGSVALILNSHHHASGGGGSGGEIVLTQSPATLSLSPGERATLSCRASQSVSSYLAWYQQKPGQAPRLLIYDASNRATGIPARFSGSGSGTDFTLTISSLEPEDFAVYYCQQRSNWPITFGQGTRLEIKGSTSGSGKPGSGEGSEVQLVESGGGLVQPGRSLRLSCAASGFTFNDYAMHWVRQAPGKGLEWVSTISWNSGSIGYADSVKGRFTISRDNAKKSLYLQMNSLRAEDTALYYCAKDIQYGNYYYGMDVWGQGTTVTVSS

SEQ ID NO: 291 - protein, 492 aa, Artificial Sequence
  Synthetic polypeptide
KEFTLDFSTAKTYVDSLNVIRSAIGTPLQTISSGGTSLLMIDNLVPMVATVVDVRGIDPEEGRFNNLRLIVERNNLYVTGFVNRTNNVFYRFADFSHVTFPGTTAVTLSGDSSYTTLQRVAGISRTGMQINRHSLTTSYLDLMSHSGTSLTQSVARAMLRFVTVTAEALRFRQIQRGFRTTLDDLSGRSYVMTAEDVDLTLNWGRLSSVLPDYHGQDSVRVGRISFGSINAILGSVALILNSHHHASRVARGGGGSGGEIVLTQSPATLSLSPGERATLSCRASQSVSSYLAWYQQKPGQAPRLLIYDASNRATGIPARFSGSGSGTDFTLTISSLEPEDFAVYYCQQRSNWPITFGQGTRLEIKGGGGSEVQLVESGGGLVQPGRSLRLSCAASGFTFNDYAMHWVRQAPGKGLEWVSTISWNSGSIGYADSVKGRFTISRDNAKKSLYLQMNSLRAEDTALYYCAKDIQYGNYYYGMDVWGQGTTVTVSS

SEQ ID NO: 292 - protein, 507 aa, Artificial Sequence
  Synthetic polypeptide
KEFTLDFSTAKTYVDSLNVIRSAIGTPLQTISSGGTSLLMIDSGSGDNLFAVDVRGIDPEEGRFNNLRLIVERNNLYVTGFVNRTNNVFYRFADFSHVTFPGTTAVTLSGDSSYTTLQRVAGISRTGMQINRHSLTTSYLDLMSHSGTSLTQSVARAMLRFVTVTAEALRFRQIQRGFRTTLDDLSGRSYVMTAEDVDLTLNWGRLSSVLPDYHGQDSVRVGRISFGSINAILGSVALILNSHHHASEFPKPSTPPGSSGGAPEIVLTQSPATLSLSPGERATLSCRASQSVSSYLAWYQQKPGQAPRLLIYDASNRATGIPARFSGSGSGTDFTLTISSLEPEDFAVYYCQQRSNWPITFGQGTRLEIKGSTSGSGKPGSGEGSEVQLVESGGGLVQPGRSLRLSCAASGFTFNDYAMHWVRQAPGKGLEWVSTISWNSGSIGYADSVKGRFTISRDNAKKSLYLQMNSLRAEDTALYYCAKDIQYGNYYYGMDVWGQGTTVTVSS

SEQ ID NO: 293 - protein, 512 aa, Artificial Sequence
  Synthetic polypeptide
KEFTLDFSTAKTYVDSLNVIRSAIGTPLQTISSGGTSLLMIDSGSGDNLFAVDVRGIDPEEGRFNNLRLIVERNNLYVTGFVNRTNNVFYRFADFSHVTFPGTTAVTLSGDSSYTTLQRVAGISRTGMQINRHSLTTSYLDLMSHSGTSLTQSVARAMLRFVTVTAEALRFRQIQRGFRTTLDDLSGRSYVMTAEDVDLTLNWGRLSSVLPDYHGQDSVRVGRISFGSINAILGSVALILNSHHHASRVAREFPKPSTPPGSSGGAPQVQLQQPGAELVKPGASVKMSCKASGYTFTSYNMHWVKQTPGRGLEWIGAIYPGNGDTSYNQKFKGKATLTADKSSSTAYMQLSSLTSEDSAVYYCARSTYYGGDWYFNVWGAGTTVTVSAGSTSGSGKPGSGEGSTKGQIVLSQSPAILSASPGEKVTMTCRASSSVSYIHWFQQKPGSSPKPWIYATSNLASGVPVRFSGSGSGTSYSLTISRVEAEDAATYYCQQWTSNPPTFGGGTKLEIK

SEQ ID NO: 294 - protein, 503 aa, Artificial Sequence; identical to SEQ ID NO: 165
  Synthetic polypeptide

SEQ ID NO: 295 - protein, 503 aa, Artificial Sequence
  Synthetic polypeptide
KEFTLDFSTAKTYVDSLNVIRSAIGTPLQTISSGGTSLLMIDSGTGDNLFAVDVRGIDPEEGRFNNLRLIVERNNLYVTGFVNRTNNVFYRFADFSHVTFPGTTAVTLSGDSSYTTLQRVAGISRTGMQINRHSLTTSYLDLMSHSGTSLTQSVARAMLRFVTVTAEALRFRQIQRGFRTTLDDLSGRSYVMTAEDVDLTLNWGRLSSVLPDYHGQDSVRVGRISFGSINAILGSVALILNSHHHASRVARGGGGSGGQVQLQQPGAELVKPGASVKMSCKASGYTFTSYNMHWVKQTPGRGLEWIGAIYPGNGDTSYNQKFKGKATLTADKSSSTAYMQLSSLTSEDSAVYYCARSTYYGGDWYFNVWGAGTTVTVSAGSTSGSGKPGSGEGSTKGQIVLSQSPAILSASPGEKVTMTCRASSSVSYIHWFQQKPGSSPKPWIYATSNLASGVPVRFSGSGSGTSYSLTISRVEAEDAATYYCQQWTSNPPTFGGGTKLEIK

SEQ ID NO: 296 - protein, 493 aa, Artificial Sequence
  Synthetic polypeptide
KEFTLDFSTAKTYVDSLNVIRSAIGTPLQTISSGGTSLLMIDSGSGDNLFAVDVRGIAPEEGRFNNLRLIVERNNLYVTGFVNRTNNVFYRFADFSHVTFPGTTAVTLSADSSYTTLQRVAGISRTGMQINRHSLTTSYLDLMSHSATSLTQSVARAMLRFVTVTAEALRFRQIQRGFRTTLDDLSGASYVMTAEDVDLTLNWGRLSSVLPDYHGQDSVRVGRISFGSINAILGSVALILNSHHHASRVARGGGGSGGQVQLQQPGAELVKPGASVKMSCKASGYTFTSYNMHWVKQTPGRGLEWIGAIYPGNGDTSYNQKFKGKATLTADKSSSTAYMQLSSLTSEDSAVYYCARSTYYGGDWYFNVWGAGTTVTVSAGGGGSTKGQIVLSQSPAILSASPGEKVTMTCRASSSVSYIHWFQQKPGSSPKPWIYATSNLASGVPVRFSGSGSGTSYSLTISRVEAEDAATYYCQQWTSNPPTFGGGTKLEIK

SEQ ID NO: 297 - protein, 525 aa, Artificial Sequence
  Synthetic polypeptide
KEFTLDFSTAKTYVDSLNVIRSAIGTPLQTISSGGTSLLMIDNLVPMVATVVDVRGIDPEEGRFNNLRLIVERNNLYVTGFVNRTNNVFYRFADFSHVTFPGTTAVTLSGDSSYTTLQRVAGISRTGMQINRHSLTTSYLDLMSHSGTSLTQSVARAMLRFVTVTAEALRFRQIQRGFRTTLDDLSGRSYVMTAEDVDLTLNWGRLSSVLPDYHGQDSVRVGRISFGSINAILGSVALILNSHHHASRVAREFPKPSTPPGSSGGAPQVQLQQPGAELVKPGASVKMSCKASGYTFTSYNMHWVKQTPGRGLEWIGAIYPGNGDTSYNQKFKGKATLTADKSSSTAYMQLSSLTSEDSAVYYCARSTYYGGDWYFNVWGAGTTVTVSAGGGGSGGGGSGGGGSGGGGSGGGGSTKGQIVLSQSPAILSASPGEKVTMTCRASSSVSYIHWFQQKPGSSPKPWIYATSNLASGVPVRFSGSGSGTSYSLTISRVEAEDAATYYCQQWTSNPPTFGGGTKLEIKDEL

SEQ ID NO: 298 - protein, 493 aa, Artificial Sequence
  Synthetic polypeptide
KEFTLDFSTAKTYVDSLNVIRSAIGTPLQTISSGGTSLLMIDSGSGDNLFAVDVRGIDPEEGRFNNLRLIVERNNLYVTGFVNRTNNVFYRFADFSHVTFPGTTAVTLSGDSSYTTLQRVAGISRTGMQINRHSLTTSYLDLMSHSGTSLTQSVARAMLRFVTVTAEALRFRQIQRGFRTTLDDLSGRSYVMTAEDVDLTLNWGRLSSVLPDYHGQDSVRVGRISFGSINAILGSVALILNSHHHASAVAAGGGGSGGQVQLQQPGAELVKPGASVKMSCKASGYTFTSYNMHWVKQTPGRGLEWIGAIYPGNGDTSYNQKFKGKATLTADKSSSTAYMQLSSLTSEDSAVYYCARSTYYGGDWYFNVWGAGTTVTVSAGGGGSTKGQIVLSQSPAILSASPGEKVTMTCRASSSVSYIHWFQQKPGSSPKPWIYATSNLASGVPVRFSGSGSGTSYSLTISRVEAEDAATYYCQQWTSNPPTFGGGTKLEIK

SEQ ID NO: 299 - protein, 509 aa, Artificial Sequence
  Synthetic polypeptide
KEFTLDFSTAKTYVDSLNVIRSAIGTPLQTISSGGTSLLMIDSGSGDNLFAVDVRGIDPEEGRFNNLRLIVERNNLYVTGFVNRTNNVFYRFADFSHVTFPGTTAVTLSGDSSYTTLQRVAGISRTGMQINRHSLTTSYLDLMSHSGTSLTQSVARAMLRFVTVTAEALRFRQIQRGFRTTLDDLSGRSYVMTAEDVDLTLNWGRLSSVLPDYHGQDSVRVGRISFGSINAILGSVALILNSHHHASRVAREFPKPSTPPGSSGGAPQVQLVQSGAELVKPGASVKMSCKASGYTFTSYNMHWVKQTPGQGLEWIGAIYPGNGDTSYNQKFKGKATLTADKSSSTAYMQLSSLTSEDSAVYYCARAQLRPNYWYFDVWGAGTTVTVSSGSTSGSGKPGSGEGSDIVLSQSPAILSASPGEKVTMTCRASSSVSYMHWYQQKPGSSPKPWIYATSNLASGVPARFSGSGSGTSYSLTISRVEAEDAATYYCQQWISNPPTFGAGTKLELK

SEQ ID NO: 300 - protein, 499 aa, Artificial Sequence
  Synthetic polypeptide
KEFTLDFSTAKTYVDSLNVIRSAIGTPLQTISSGGTSLLMIDNLVPMVATVVDVRGIDPEEGRFNNLRLIVERNNLYVTGFVNRTNNVFYRFADFSHVTFPGTTAVTLSGDSSYTTLQRVAGISRTGMQINRHSLTTSYLDLMSHSGTSLTQSVARAMLRFVTVTAEALRFRQIQRGFRTTLDDLSGRSYVMTAEDVDLTLNWGRLSSVLPDYHGQDSVRVGRISFGSINAILGSVALILNSHHHASRVAREFPKPSTPPGSSGGAPQVQLVQSGAELVKPGASVKMSCKASGYTFTSYNMHWVKQTPGQGLEWIGAIYPGNGDTSYNQKFKGKATLTADKSSSTAYMQLSSLTSEDSAVYYCARAQLRPNYWYFDVWGAGTTVTVSSGGGGSDIVLSQSPAILSASPGEKVTMTCRASSSVSYMHWYQQKPGSSPKPWIYATSNLASGVPARFSGSGSGTSYSLTISRVEAEDAATYYCQQWISNPPTFGAGTKLELK

SEQ ID NO: 301 - protein, 496 aa, Artificial Sequence
  Synthetic polypeptide
KEFTLDFSTAKTYVDSLNVIRSAIGTPLQTISSGGTSLLMIDSGSGDNLFAVDVRGIDPEEGRFNNLRLIVERNNLYVTGFVNRTNNVFYRFADFSHVTFPGTTAVTLSGDSSYTTLQRVAGISRTGMQINRHSLTTSYLDLMSHSGTSLTQSVARAMLRFVTVTAEALRFRQIQRGFRTTLDDLSGRSYVMTAEDVDLTLNWGRLSSVLPDYHGQDSVRVGRISFGSINAILGSVALILNSHHHASGGGGSGGQVQLVQSGAELVKPGASVKMSCKASGYTFTSYNMHWVKQTPGQGLEWIGAIYPGNGDTSYNQKFKGKATLTADKSSSTAYMQLSSLTSEDSAVYYCARAQLRPNYWYFDVWGAGTTVTVSSGSTSGSGKPGSGEGSDIVLSQSPAILSASPGEKVTMTCRASSSVSYMHWYQQKPGSSPKPWIYATSNLASGVPARFSGSGSGTSYSLTISRVEAEDAATYYCQQWISNPPTFGAGTKLELK

SEQ ID NO: 302 - protein, 512 aa, Artificial Sequence; identical to SEQ ID NO: 293
  Synthetic polypeptide

SEQ ID NO: 303 - protein, 502 aa, Artificial Sequence
  Synthetic polypeptide
KEFTLDFSTAKTYVDSLNVIRSAIGTPLQTISSGGTSLLMIDNLVPMVATVVDVRGIDPEEGRFNNLRLIVERNNLYVTGFVNRTNNVFYRFADFSHVTFPGTTAVTLSGDSSYTTLQRVAGISRTGMQINRHSLTTSYLDLMSHSGTSLTQSVARAMLRFVTVTAEALRFRQIQRGFRTTLDDLSGRSYVMTAEDVDLTLNWGRLSSVLPDYHGQDSVRVGRISFGSINAILGSVALILNSHHHASRVAREFPKPSTPPGSSGGAPQVQLQQPGAELVKPGASVKMSCKASGYTFTSYNMHWVKQTPGRGLEWIGAIYPGNGDTSYNQKFKGKATLTADKSSSTAYMQLSSLTSEDSAVYYCARSTYYGGDWYFNVWGAGTTVTVSAGGGGSTKGQIVLSQSPAILSASPGEKVTMTCRASSSVSYIHWFQQKPGSSPKPWIYATSNLASGVPVRFSGSGSGTSYSLTISRVEAEDAATYYCQQWTSNPPTFGGGTKLEIK

SEQ ID NO: 304 - protein, 492 aa, Artificial Sequence
  Synthetic polypeptide
KEFTLDFSTAKTYVDSLNVIRSAIGTPLQTISSGGTSLLMIDSGSGDNLFAVDVRGIDPEEGRFNNLRLIVERNNLYVTGFVNRTNNVFYRFADFSHVTFPGTTAVTLSGDSSYTTLQRVAGISRTGMQINRHSLTTSYLDLMSHSGTSLTQSVARAMLRFVTVTAEALRFRQIQRGFRTTLDDLSGRSYVMTAEDVDLTLNWGRLSSVLPDYHGQDSVRVGRISFGSINAILGSVALILNSHHHASAVAAGGGGSGGQVQLQQPGAELVKPGASVKMSCKASGYTFTSYNMHWVKQTPGRGLEWIGAIYPGNGDTSYNQKFKGKATLTADKSSSTAYMQLSSLTSEDSAVYYCARSTYYGGDWYFNVWGAGTTVTVSAGGGGSGGGGSGGGGSGGGGSGGGGSTKGQIVLSQSPAILSASPGEKVTMTCRASSSVSYIHWFQQKPGSSPKPWIYATSNLASGVPVRFSGSGSGTSYSLTISRVEAEDKDEL

SEQ ID NO: 305 - protein, 4 aa, Artificial Sequence
  Synthetic peptide
KDEL

SEQ ID NO: 306 - protein, 4 aa, Artificial Sequence
  Synthetic peptide
HDEF

SEQ ID NO: 307 - protein, 4 aa, Artificial Sequence
  Synthetic peptide
HDEL

SEQ ID NO: 308 - protein, 4 aa, Artificial Sequence
  Synthetic peptide
RDEF

SEQ ID NO: 309 - protein, 4 aa, Artificial Sequence
  Synthetic peptide
RDEL

SEQ ID NO: 310 - protein, 4 aa, Artificial Sequence
  Synthetic peptide
WDEL

SEQ ID NO: 311 - protein, 4 aa, Artificial Sequence
  Synthetic peptide
YDEL

SEQ ID NO: 312 - protein, 4 aa, Artificial Sequence
  Synthetic peptide
HEEF

SEQ ID NO: 313 - protein, 4 aa, Artificial Sequence
  Synthetic peptide
HEEL

SEQ ID NO: 314 - protein, 4 aa, Artificial Sequence
  Synthetic peptide
KEEL

SEQ ID NO: 315 - protein, 4 aa, Artificial Sequence
  Synthetic peptide
REEL

SEQ ID NO: 316 - protein, 4 aa, Artificial Sequence
  Synthetic peptide
KAEL

SEQ ID NO: 317 - protein, 4 aa, Artificial Sequence
  Synthetic peptide
KCEL

SEQ ID NO: 318 - protein, 4 aa, Artificial Sequence
  Synthetic peptide
KFEL

SEQ ID NO: 319 - protein, 4 aa, Artificial Sequence
  Synthetic peptide
KGEL

SEQ ID NO: 320 - protein, 4 aa, Artificial Sequence
  Synthetic peptide
KHEL

SEQ ID NO: 321 - protein, 4 aa, Artificial Sequence
  Synthetic peptide
KLEL

SEQ ID NO: 322 - protein, 4 aa, Artificial Sequence
  Synthetic peptide
KNEL

SEQ ID NO: 323 - protein, 4 aa, Artificial Sequence
  Synthetic peptide
KQEL

SEQ ID NO: 324 - protein, 4 aa, Artificial Sequence
  Synthetic peptide
KREL

SEQ ID NO: 325 - protein, 4 aa, Artificial Sequence
  Synthetic peptide
KSEL

SEQ ID NO: 326 - protein, 4 aa, Artificial Sequence
  Synthetic peptide
KVEL

SEQ ID NO: 327 - protein, 4 aa, Artificial Sequence
  Synthetic peptide
KWEL

SEQ ID NO: 328 - protein, 4 aa, Artificial Sequence
  Synthetic peptide
KYEL

SEQ ID NO: 329 - protein, 4 aa, Artificial Sequence
  Synthetic peptide
KEDL

SEQ ID NO: 330 - protein, 4 aa, Artificial Sequence
  Synthetic peptide
KIEL

SEQ ID NO: 331 - protein, 4 aa, Artificial Sequence
  Synthetic peptide
DKEL

SEQ ID NO: 332 - protein, 4 aa, Artificial Sequence
  Synthetic peptide
FDEL

SEQ ID NO: 333 - protein, 4 aa, Artificial Sequence
  Synthetic peptide
KDEF

SEQ ID NO: 334 - protein, 4 aa, Artificial Sequence
  Synthetic peptide
KKEL

SEQ ID NO: 335 - protein, 4 aa, Artificial Sequence
  Synthetic peptide
HADL

SEQ ID NO: 336 - protein, 4 aa, Artificial Sequence
  Synthetic peptide
HAEL

SEQ ID NO: 337 - protein, 4 aa, Artificial Sequence
  Synthetic peptide
HIEL

SEQ ID NO: 338 - protein, 4 aa, Artificial Sequence
  Synthetic peptide
HNEL

SEQ ID NO: 339 - protein, 4 aa, Artificial Sequence
  Synthetic peptide
HTEL

SEQ ID NO: 340 - protein, 4 aa, Artificial Sequence
  Synthetic peptide
KTEL

SEQ ID NO: 341 - protein, 4 aa, Artificial Sequence
  Synthetic peptide
HVEL

SEQ ID NO: 342 - protein, 4 aa, Artificial Sequence
  Synthetic peptide
NDEL

SEQ ID NO: 343 - protein, 4 aa, Artificial Sequence
  Synthetic peptide
QDEL

SEQ ID NO: 344 - protein, 4 aa, Artificial Sequence
  Synthetic peptide
REDL

SEQ ID NO: 345 - protein, 4 aa, Artificial Sequence
  Synthetic peptide
RNEL

SEQ ID NO: 346 - protein, 4 aa, Artificial Sequence
  Synthetic peptide
RTDL

SEQ ID NO: 347 - protein, 4 aa, Artificial Sequence
  Synthetic peptide
RTEL

SEQ ID NO: 348 - protein, 4 aa, Artificial Sequence
  Synthetic peptide
SDEL

SEQ ID NO: 349 - protein, 4 aa, Artificial Sequence
  Synthetic peptide
TDEL

SEQ ID NO: 350 - protein, 4 aa, Artificial Sequence
  Synthetic peptide
SKEL

SEQ ID NO: 351 - protein, 4 aa, Artificial Sequence
  Synthetic peptide
STEL

SEQ ID NO: 352 - protein, 4 aa, Artificial Sequence
  Synthetic peptide
EDEL

SEQ ID NO: 353 - protein, 6 aa, Artificial Sequence
  Synthetic peptide
ASGGPE

SEQ ID NO: 354 - protein, 54 aa, Artificial Sequence
  Synthetic polypeptide
  MISC_FEATURE (3)..(52): This region may encompass 1-10 'Gly(2-4)Ser' repeating units
  MISC_FEATURE (5)..(6): May or may not be present
  MISC_FEATURE (10)..(11): May or may not be present
  MISC_FEATURE (15)..(16): May or may not be present
  MISC_FEATURE (20)..(21): May or may not be present
  MISC_FEATURE (25)..(26): May or may not be present
  MISC_FEATURE (30)..(31): May or may not be present
  MISC_FEATURE (35)..(36): May or may not be present
  MISC_FEATURE (40)..(41): May or may not be present
  MISC_FEATURE (45)..(46): May or may not be present
  MISC_FEATURE (50)..(51): May or may not be present
AMGGGGSGGGGSGGGGSGGGGSGGGGSGGGGSGGGGSGGGGSGGGGSGGGGSAM

SEQ ID NO: 355 - protein, 210 aa, Artificial Sequence
  Synthetic polypeptide
  MISC_FEATURE (1)..(210): This sequence may encompass 1-30 '(Gly)X-Ser' repeating units, wherein X represents 1-6
  MISC_FEATURE (2)..(6): May or may not be present
  MISC_FEATURE (9)..(13): May or may not be present
  MISC_FEATURE (16)..(20): May or may not be present
  MISC_FEATURE (23)..(27): May or may not be present
  MISC_FEATURE (30)..(34): May or may not be present
  MISC_FEATURE (37)..(41): May or may not be present
  MISC_FEATURE (44)..(48): May or may not be present
  MISC_FEATURE (51)..(55): May or may not be present
  MISC_FEATURE (58)..(62): May or may not be present
  MISC_FEATURE (65)..(69): May or may not be present
  MISC_FEATURE (72)..(76): May or may not be present
  MISC_FEATURE (79)..(83): May or may not be present
  MISC_FEATURE (86)..(90): May or may not be present
  MISC_FEATURE (93)..(97): May or may not be present
  MISC_FEATURE (100)..(104): May or may not be present
  MISC_FEATURE (107)..(111): May or may not be present
  MISC_FEATURE (114)..(118): May or may not be present
  MISC_FEATURE (121)..(125): May or may not be present
  MISC_FEATURE (128)..(132): May or may not be present
  MISC_FEATURE (135)..(139): May or may not be present
  MISC_FEATURE (142)..(146): May or may not be present
  MISC_FEATURE (149)..(153): May or may not be present
  MISC_FEATURE (156)..(160): May or may not be present
  MISC_FEATURE (163)..(167): May or may not be present
  MISC_FEATURE (170)..(174): May or may not be present
  MISC_FEATURE (177)..(181): May or may not be present
  MISC_FEATURE (184)..(188): May or may not be present
  MISC_FEATURE (191)..(195): May or may not be present
  MISC_FEATURE (198)..(202): May or may not be present
  MISC_FEATURE (205)..(209): May or may not be present
GGGGGGSGGGGGGSGGGGGGSGGGGGGSGGGGGGSGGGGGGSGGGGGGSGGGGGGSGGGGGGSGGGGGGSGGGGGGSGGGGGGSGGGGGGSGGGGGGSGGGGGGSGGGGGGSGGGGGGSGGGGGGSGGGGGGSGGGGGGSGGGGGGSGGGGGGSGGGGGGSGGGGGGSGGGGGGSGGGGGGSGGGGGGSGGGGGGSGGGGGGSGGGGGGS

SEQ ID NO: 356 - protein, 210 aa, Artificial Sequence
  Synthetic polypeptide
  MISC_FEATURE (1)..(210): This sequence may encompass 1-30 '(Ser)X-Gly' repeating units, wherein X represents 1-6
  MISC_FEATURE (2)..(6): May or may not be present
  MISC_FEATURE (9)..(13): May or may not be present
  MISC_FEATURE (16)..(20): May or may not be present
  MISC_FEATURE (23)..(27): May or may not be present
  MISC_FEATURE (30)..(34): May or may not be present
  MISC_FEATURE (37)..(41): May or may not be present
  MISC_FEATURE (44)..(48): May or may not be present
  MISC_FEATURE (51)..(55): May or may not be present
  MISC_FEATURE (58)..(62): May or may not be present
  MISC_FEATURE (65)..(69): May or may not be present
  MISC_FEATURE (72)..(76): May or may not be present
  MISC_FEATURE (79)..(83): May or may not be present
  MISC_FEATURE (86)..(90): May or may not be present
  MISC_FEATURE (93)..(97): May or may not be present
  MISC_FEATURE (100)..(104): May or may not be present
  MISC_FEATURE (107)..(111): May or may not be present
  MISC_FEATURE (114)..(118): May or may not be present
  MISC_FEATURE (121)..(125): May or may not be present
  MISC_FEATURE (128)..(132): May or may not be present
  MISC_FEATURE (135)..(139): May or may not be present
  MISC_FEATURE (142)..(146): May or may not be present
  MISC_FEATURE (149)..(153): May or may not be present
  MISC_FEATURE (156)..(160): May or may not be present
  MISC_FEATURE (163)..(167): May or may not be present
  MISC_FEATURE (170)..(174): May or may not be present
  MISC_FEATURE (177)..(181): May or may not be present
  MISC_FEATURE (184)..(188): May or may not be present
  MISC_FEATURE (191)..(195): May or may not be present
  MISC_FEATURE (198)..(202): May or may not be present
  MISC_FEATURE (205)..(209): May or may not be present
SSSSSSGSSSSSSGSSSSSSGSSSSSSGSSSSSSGSSSSSSGSSSSSSGSSSSSSGSSSSSSGSSSSSSGSSSSSSGSSSSSSGSSSSSSGSSSSSSGSSSSSSGSSSSSSGSSSSSSGSSSSSSGSSSSSSGSSSSSSGSSSSSSGSSSSSSGSSSSSSGSSSSSSGSSSSSSGSSSSSSGSSSSSSGSSSSSSGSSSSSSGSSSSSSG

SEQ ID NO: 357 - protein, 150 aa, Artificial Sequence
  Synthetic polypeptide
  MISC_FEATURE (1)..(150): This sequence may encompass 1-30 'Gly-Gly-Gly- Gly-Ser' repeating units
GGGGSGGGGSGGGGSGGGGSGGGGSGGGGSGGGGSGGGGSGGGGSGGGGSGGGGSGGGGSGGGGSGGGGSGGGGSGGGGSGGGGSGGGGSGGGGSGGGGSGGGGSGGGGSGGGGSGGGGSGGGGSGGGGSGGGGSGGGGSGGGGSGGGGS

SEQ ID NO: 358 - protein, 30 aa, Artificial Sequence
  Synthetic polypeptide
  MISC_FEATURE (2)..(30): May or may not be present
GGGGGGGGGGGGGGGGGGGGGGGGGGGGGG

SEQ ID NO: 359 - protein, 12 aa, Artificial Sequence
  Synthetic peptide
GKSSGSGSESKS

SEQ ID NO: 360 - protein, 14 aa, Artificial Sequence
  Synthetic peptide
EGKSSGSGSESKEF

SEQ ID NO: 361 - protein, 14 aa, Artificial Sequence
  Synthetic peptide
GSTSGSGKSSEGKG

SEQ ID NO: 362 - protein, 18 aa, Artificial Sequence
  Synthetic peptide
GSTSGSGKSSEGSGSTKG

SEQ ID NO: 363 - protein, 18 aa, Artificial Sequence
  Synthetic peptide
GSTSGSGKPGSGEGSTKG

SEQ ID NO: 364 - protein, 5 aa, Artificial Sequence
  Synthetic peptide
SRSSG

SEQ ID NO: 365 - protein, 5 aa, Artificial Sequence
  Synthetic peptide
SGSSC

SEQ ID NO: 366 - protein, 28 aa, Artificial Sequence
  Synthetic peptide
AMGRSGGGCAGNRVGSSLSCGGLNLQAM

SEQ ID NO: 367 - protein, 15 aa, Artificial Sequence
  Synthetic peptide
GGGGSGGGGSGGGGS

SEQ ID NO: 368 - protein, 4 aa, Artificial Sequence
  Synthetic peptide
GGGS

SEQ ID NO: 369 - protein, 8 aa, Artificial Sequence
  Synthetic peptide
GGGGSGGG

SEQ ID NO: 370 - protein, 7 aa, Artificial Sequence
  Synthetic peptide
GGSGGGG

SEQ ID NO: 371 - protein, 18 aa, Artificial Sequence
  Synthetic peptide
GSTSGGGSGGGSGGGGSS

SEQ ID NO: 372 - protein, 18 aa, Artificial Sequence
  Synthetic peptide
GSTSGSGKPGSSEGSTKG

SEQ ID NO: 373 - protein, 5 aa, Artificial Sequence
  Synthetic peptide
GGGGC

SEQ ID NO: 374 - protein, 6 aa, Artificial Sequence
  Synthetic peptide
SGGGGC

SEQ ID NO: 375 - protein, 245 aa, Artificial Sequence
  Synthetic polypeptide
MQVQLQQPGAELVKPGASVKMSCKTSGYTFTSYNVHWVKQTPGQGLEWIGAIYPGNGDTSFNQKFKGKATLTADKSSSTVYMQLSSLTSEDSAVYYCARSNYYGSSYVWFFDVWGAGTTVTVSSGSTSGSGKPGSGEGSQIVLSQSPTILSASPGEKVTMTCRASSSVSYMDWYQQKPGSSPKPWIYATSNLASGVPARFSGSGSGTSYSLTISRVEAEDAATYYCQQWISNPPTFGAGTKLELK

SEQ ID NO: 376 - protein, 124 aa, Artificial Sequence
  Synthetic polypeptide
MQVQLQQPGAELVKPGASVKMSCKTSGYTFTSYNVHWVKQTPGQGLEWIGAIYPGNGDTSFNQKFKGKATLTADKSSSTVYMQLSSLTSEDSAVYYCARSNYYGSSYVWFFDVWGAGTTVTVSS

SEQ ID NO: 377 - protein, 106 aa, Artificial Sequence
  Synthetic polypeptide
QIVLSQSPTILSASPGEKVTMTCRASSSVSYMDWYQQKPGSSPKPWIYATSNLASGVPARFSGSGSGTSYSLTISRVEAEDAATYYCQQWISNPPTFGAGTKLELK

SEQ ID NO: 378 - protein, 15 aa, Artificial Sequence
  Synthetic polypeptide
GSTSGSGKPGSGEGS

SEQ ID NO: 379 - protein, 16 aa, Artificial Sequence
  Synthetic polypeptide
EFPKPSTPPGSSGGAP

SEQ ID NO: 380 - protein, 177 aa, Artificial Sequence
  Synthetic polypeptide
NLYVTGFVNRTNNVFYRFADFSHVTFPGTTAVTLSGDSSYTTLQRVAGISRTGMQINRHSLTTSYLDLMSHSGTSLTQSVARAMLRFVTVTAEALRFRQIQRGFRTTLDDLSGRSYVMTAEDVDLTLNWGRLSSVLPDYHGQDSVRVGRISFGSINAILGSVALILNCHHHASRVAR

SEQ ID NO: 381 - protein, 241 aa, Artificial Sequence
  Synthetic polypeptide
KEFTLDFSTAKTYVDSLNVIRSAIGTPLQTISSGGTSLLMIDSGSGDNLFAVDVRGIDPEEGRFNNLRLIVERNNLYVTGFVNRTNNVFYRFADFSHVTFPGTTAVTLSGDSSYTTLQRVAGISRTGMQINRHSLTTSYLDLMSHSGTSLTQSVARAMLRFVTVTAEALRFRQIQRGFRTTLDDLSGRSYVMTAEDVDLTLNWGRLSSVLPDYHGQDSVRVGRISFGSINAILGSVALILN

SEQ ID NO: 382 - protein, 251 aa, Artificial Sequence; identical to SEQ ID NO: 4
  Synthetic polypeptide

SEQ ID NO: 383 - protein, 261 aa, Artificial Sequence
  Synthetic polypeptide
KEFTLDFSTAKTYVDSLNVIRSAIGTPLQTISSGGTSLLMIDSGSGDNLFAVDVRGIDPEEGRFNNLRLIVERNNLYVTGFVNRTNNVFYRFADFSHVTFPGTTAVTLSGDSSYTTLQRVAGISRTGMQINRHSLTTSYLDLMSHSGTSLTQSVARAMLRFVTVTAEALRFRQIQRGFRTTLDDLSGRSYVMTAEDVDLTLNWGRLSSVLPDYHGQDSVRVGRISFGSINAILGSVALILNCHHHASRVARMASDEFPSMC

SEQ ID NO: 384 - protein, 177 aa, Artificial Sequence; identical to SEQ ID NO: 380
  Synthetic polypeptide

SEQ ID NO: 385 - protein, 241 aa, Artificial Sequence
  Synthetic polypeptide
KEFTLDFSTAKTYVDSLNVIRSAIGTPLQTISSGGTSLLMIDSGTGDNLFAVDVRGIDPEEGRFNNLRLIVERNNLYVTGFVNRTNNVFYRFADFSHVTFPGTTAVTLSGDSSYTTLQRVAGISRTGMQINRHSLTTSYLDLMSHSGTSLTQSVARAMLRFVTVTAEALRFRQIQRGFRTTLDDLSGRSYVMTAEDVDLTLNWGRLSSVLPDYHGQDSVRVGRISFGSINAILGSVALILN

SEQ ID NO: 386 - protein, 251 aa, Artificial Sequence
  Synthetic polypeptide
KEFTLDFSTAKTYVDSLNVIRSAIGTPLQTISSGGTSLLMIDSGTGDNLFAVDVRGIDPEEGRFNNLRLIVERNNLYVTGFVNRTNNVFYRFADFSHVTFPGTTAVTLSGDSSYTTLQRVAGISRTGMQINRHSLTTSYLDLMSHSGTSLTQSVARAMLRFVTVTAEALRFRQIQRGFRTTLDDLSGRSYVMTAEDVDLTLNWGRLSSVLPDYHGQDSVRVGRISFGSINAILGSVALILNCHHHASRVAR

SEQ ID NO: 387 - protein, 261 aa, Artificial Sequence
  Synthetic polypeptide
KEFTLDFSTAKTYVDSLNVIRSAIGTPLQTISSGGTSLLMIDSGTGDNLFAVDVRGIDPEEGRFNNLRLIVERNNLYVTGFVNRTNNVFYRFADFSHVTFPGTTAVTLSGDSSYTTLQRVAGISRTGMQINRHSLTTSYLDLMSHSGTSLTQSVARAMLRFVTVTAEALRFRQIQRGFRTTLDDLSGRSYVMTAEDVDLTLNWGRLSSVLPDYHGQDSVRVGRISFGSINAILGSVALILNCHHHASRVARMASDEFPSMC

SEQ ID NO: 388 - protein, 177 aa, Artificial Sequence
  Synthetic polypeptide
NLYVAGFINTETNIFYRFSDFSHISVPDVITVSMTTDSSYSSLQRIADLERTGMQIGRHSLVGSYLDLMEFRGRSMTRASSRAMLRFVTVIAEALRFRQIQRGFRPALSEASPLYTMTAQDVDLTLNWGRISNVLPEYRGEEGVRIGRISFNSLSAILGSVAVILNCHSTGSYSVRS

SEQ ID NO: 389 - protein, 241 aa, Artificial Sequence
  Synthetic polypeptide
DEFTVDFSSQKSYVDSLNSIRSAISTPLGNISQGGVSVSVINHVLGGNYISLNVRGLDPYSERFNHLRLIMERNNLYVAGFINTETNIFYRFSDFSHISVPDVITVSMTTDSSYSSLQRIADLERTGMQIGRHSLVGSYLDLMEFRGRSMTRASSRAMLRFVTVIAEALRFRQIQRGFRPALSEASPLYTMTAQDVDLTLNWGRISNVLPEYRGEEGVRIGRISFNSLSAILGSVAVILNC

SEQ ID NO: 390 - protein, 251 aa, Artificial Sequence
  Synthetic polypeptide
DEFTVDFSSQKSYVDSLNSIRSAISTPLGNISQGGVSVSVINHVLGGNYISLNVRGLDPYSERFNHLRLIMERNNLYVAGFINTETNIFYRFSDFSHISVPDVITVSMTTDSSYSSLQRIADLERTGMQIGRHSLVGSYLDLMEFRGRSMTRASSRAMLRFVTVIAEALRFRQIQRGFRPALSEASPLYTMTAQDVDLTLNWGRISNVLPEYRGEEGVRIGRISFNSLSAILGSVAVILNCHSTGSYSVRS

SEQ ID NO: 391 - protein, 261 aa, Artificial Sequence
  Synthetic polypeptide
DEFTVDFSSQKSYVDSLNSIRSAISTPLGNISQGGVSVSVINHVLGGNYISLNVRGLDPYSERFNHLRLIMERNNLYVAGFINTETNIFYRFSDFSHISVPDVITVSMTTDSSYSSLQRIADLERTGMQIGRHSLVGSYLDLMEFRGRSMTRASSRAMLRFVTVIAEALRFRQIQRGFRPALSEASPLYTMTAQDVDLTLNWGRISNVLPEYRGEEGVRIGRISFNSLSAILGSVAVILNCHSTGSYSVRSVSQKQKTECQ
